(19) United States
(12) Patent Application Publication
(10) Pub. No.: US 2022/0226442 A1
(43) Pub. Date: Jul. 21, 2022

(54) INTERLEUKIN-2 AGENTS AND USES THEREOF

(71) Applicant: VISTERRA, INC., Waltham, MA (US)

(72) Inventors: Scott Moore Carlson, Boston, MA (US); Gregory Babcock, Marlborough, MA (US); Zachary Shriver, Winchester, MA (US); Boopathy Ramakrishnan, Braintree, MA (US); Susan Sloan, Newton, MA (US)

(21) Appl. No.: 17/580,038

(22) Filed: Jan. 20, 2022

Related U.S. Application Data
(60) Provisional application No. 63/281,397, filed on Nov. 19, 2021.
(60) Provisional application No. 63/139,736, filed on Jan. 20, 2021.

(51) Int. Cl. A61K 38/20; C12N 5/0783; A61P 13/12; A61P 37/06

(52) U.S. Cl. CPC A61K 38/2013; C12N 5/0637; C12N 2501/2302; A61P 37/06; A61P 13/12

(57) ABSTRACT

IL-2 agents that comprise IL-2 variants are disclosed as well as methods, compositions, and uses thereof. The IL-2 agents described herein can be used to treat and/or prevent various disorders and conditions.

### CROSS REFERENCE TO RELATED APPLICATIONS

[0001] This application claims the benefit of U.S. Provisional Application No. 63/139,736, filed on Jan. 20, 2021, and U.S. Provisional Application No. 63/281,397, filed Nov. 19, 2021. The contents of the aforementioned applications are hereby incorporated by reference in their entirety.

### SEQUENCE LISTING

[0002] The instant application contains a Sequence Listing which has been submitted electronically in ASCII format and is hereby incorporated by reference in its entirety. Said ASCII copy, created on Jan. 14, 2022, is named P2029-7043WO_SL.txt and is 1,728,525 bytes in size.

### BACKGROUND

[0003] Interleukin-2 (IL-2) is a cytokine that regulates the activities of the immune system. It is produced by leukocytes, such as T cells, natural killer (NK) cells, dendritic cells, and macrophages, in response to antigenic or mitogenic stimulation. IL-2 is important for T cell proliferation, B cell stimulation, and other activities associated with immunity and tolerance. It is part of the body's adaptive immune response and discriminates between foreign and host antigens. IL-2 mediates its effects by binding to IL-2 receptors, which in turn activate downstream signaling events.

[0004] Human IL-2 is an-FDA approved drug for the treatment of diseases such as metastatic renal carcinoma and melanoma. The use of IL-2 in eligible patients is sometimes restricted due to the severe toxicity associated with IL-2 therapy, and only a small subset of eligible patients will actually receive therapy. The toxicities associated with IL-2 therapy can include severe fever, nausea, vomiting, vascular leak and serious hypotension. Despite these toxicities, however, IL-2 is typically effective for its approved indications.

[0005] For patients with various diseases and conditions that are amenable to treatment with IL-2, there continues to be an unmet need for novel IL-2-based agents that exhibit characteristics sufficient for the development of a safe and efficacious therapeutic.

### SUMMARY

[0006] This disclosure provides, at least in part, IL-2 agents (e.g., IL-2 variants, IL-2 fusion proteins, IL-2 complexes, and IL-2 conjugates) that comprise one or more amino acid alterations (e.g., substitutions) in IL-2, and that comprise one or more of the structural or functional properties disclosed herein. In an embodiment, nucleic acid molecules encoding the IL-2 agents, expression vectors, host cells, compositions (e.g., pharmaceutical compositions), kits, containers, and methods for making the IL-2 agents, are also provided. The IL-2 agents disclosed herein can be used (alone or in combination with other agents or therapeutic modalities) to treat, prevent, and/or diagnose disorders, such as disorders and conditions disclosed herein.

[0007] In an aspect, the disclosure features a method of treating a disorder, comprising administering to a subject in need thereof an effective amount of an IL-2 agent described herein, such that the level of phosphor-STAT5 (p-STAT5) signaling in a Treg cell from the subject is increased, thereby treating the disorder.

[0008] In an embodiment, the level of p-STAT5 signaling in the Treg cell is increased by at least 2, 3, 4, 5, 6, 7, 8, 9, or 10 fold.

[0009] In an embodiment, the level of p-STAT5 signaling in a NK cell and/or a cytotoxic T cell from the subject in not substantially increased. In an embodiment, the level of p-STAT signaling in the NK cell and/or cytotoxic T cell is increased by no more than 50%, 40%, 30%, 20%, or 10%.

[0010] In an embodiment, the disorder is, or the subject has, a disorder described herein. In an embodiment, the disorder is, or the subject has, lupus nephritis. In an embodiment, the disorder is, or the subject has, psoriasis. In an embodiment, the disorder is, or the subject has, an autoimmune disorder, e.g., an autoimmune disorder described herein. In an embodiment, the disorder is, or the subject has, systemic lupus erythematosus (SLE), autoimmune hepatitis (AIH), immune-related focal segmented glomerulosclerosis (IM-FSGS), or alopecia areata (AA).

[0011] In an embodiment, the method further comprises determining the level of p-STAT5 signaling in an immune cell (e.g., in a T reg cell, an NK cell, and/or a cytotoxic T cell) from the subject. In an embodiment, the method further comprises isolating a blood cell (e.g., a PBMC) from the subject.

[0012] In an embodiment, the determining step is performed prior to, during, and/or subsequent to the contacting or administering step. In an embodiment, the level of p-STAT5 signaling is determined using a flow cytometry-based p-STAT5 assay, e.g., as described in Example 13.

[0013] In an embodiment, the IL-2 agent comprises an IL-2 variant comprising: (i) the amino acid substitution H16L or H16N, and/or the amino acid substitution I92S, and (ii) the amino acid substitutions V69A, Q74P, and C125S, corresponding to human IL-2 (SEQ ID NO: 1031). In an embodiment, the IL-2 variant further comprises the amino acid substitution T3A. In an embodiment, the IL-2 variant comprises the amino acid sequence of any of SEQ ID NOs: 4, 5, 11, 1000, 1001, or 1002, an amino acid sequence that is at least 95% identical thereto or differs by no more than 1, 2, 3, 4, or 5 amino acids therefrom, or a functional fragment thereof.

[0014] In an embodiment, the IL-2 agent comprises an IL-2 fusion protein comprising the IL-2 variant. In an embodiment, the IL-2 fusion protein further comprises an Fc region. In an embodiment, the Fc region comprises an Fc region of IgG1 allotype m3 comprising an N297G substitution according to EU numbering. In an embodiment, the Fc region comprises the amino acid sequence of SEQ ID NO: 1003, or an amino acid sequence that is at least 95% identical thereto or differs by no more than 1, 2, 3, 4, 5, 6, 7, 8, 9, or 10 amino acids therefrom, or a functional fragment thereof. In an embodiment, the Fc region is fused to the C-terminus of the IL-2 variant. In an embodiment, the IL-2 fusion protein further comprises a linker. In an embodiment, the linker comprises (G₄S)₄ (SEQ ID NO: 48). In an embodiment, the fusion protein comprises an amino acid sequence of any of SEQ ID NOs: 1004, 1005, 1006, 1007, 1008, or 1009, an amino acid sequence that is at least 95% identical thereto or differs by no more than 1, 2, 3, 4, 5, 6, 7, 8, 9, or 10 amino acids therefrom, or a functional fragment thereof. In an embodiment, the fusion protein forms a dimer.

[0015] In an aspect, the disclosure features a method of increasing p-STAT5 signaling, comprising contacting a Treg cell from a subject having a disorder with an IL-2 agent described herein in an amount sufficient to increase the level of p-STAT5 signaling in the Treg cell, compared to a reference level of p-STAT5 signaling, wherein the reference level is the level of p-STAT5 signaling in a Treg cell from a subject who does not have the disorder, and wherein the Treg cell from the subject who does not have the disorder has been contacted with the same amount of the IL-2 agent, thereby increasing p-STAT5 signaling.

[0016] In an embodiment, the level of p-STAT5 signaling in the Treg cell is increased by at least 2, 3, 4, 5, 6, 7, 8, 9, or 10 fold.

[0017] In an embodiment, the level of p-STAT5 signaling in a NK cell and/or a cytotoxic T cell from the subject in not substantially increased. In an embodiment, the level of p-STAT signaling in the NK cell and/or cytotoxic T cell is increased by no more than 50%, 40%, 30%, 20%, or 10%.

[0018] In an embodiment, the disorder is, or the subject has, a disorder described herein. In an embodiment, the disorder is, or the subject has, lupus nephritis. In an embodiment, the disorder is, or the subject has, psoriasis. In an embodiment, the disorder is, or the subject has, an autoimmune disorder, e.g., an autoimmune disorder described herein. In an embodiment, the disorder is, or the subject has, systemic lupus erythematosus (SLE), autoimmune hepatitis (AIH), immune-related focal segmented glomerulosclerosis (IM-FSGS), or alopecia areata (AA).

[0019] In an embodiment, the method further comprises determining the level of p-STAT5 signaling in an immune cell (e.g., in a T reg cell, an NK cell, and/or a cytotoxic T cell) from the subject. In an embodiment, the method further comprises isolating a blood cell (e.g., a PBMC) from the subject.

[0020] In an embodiment, the determining step is performed prior to, during, and/or subsequent to the contacting or administering step. In an embodiment, the level of p-STAT5 signaling is determined using a flow cytometry-based p-STAT5 assay, e.g., as described in Example 13.

[0021] In an embodiment, the IL-2 agent comprises an IL-2 variant comprising: (i) the amino acid substitution H16L or H16N, and/or the amino acid substitution I92S, and (ii) the amino acid substitutions V69A, Q74P, and C125S, corresponding to human IL-2 (SEQ ID NO: 1031). In an embodiment, the IL-2 variant further comprises the amino acid substitution T3A. In an embodiment, the IL-2 variant comprises the amino acid sequence of any of SEQ ID NOs: 4, 5, 11, 1000, 1001, or 1002, an amino acid sequence that is at least 95% identical thereto or differs by no more than 1, 2, 3, 4, or 5 amino acids therefrom, or a functional fragment thereof.

[0022] In an embodiment, the IL-2 agent comprises an IL-2 fusion protein comprising the IL-2 variant. In an embodiment, the IL-2 fusion protein further comprises an Fc region. In an embodiment, the Fc region comprises an Fc region of IgG1 allotype m3 comprising an N297G substitution according to EU numbering. In an embodiment, the Fc region comprises the amino acid sequence of SEQ ID NO: 1003, or an amino acid sequence that is at least 95% identical thereto or differs by no more than 1, 2, 3, 4, 5, 6, 7, 8, 9, or 10 amino acids therefrom, or a functional fragment thereof. In an embodiment, the Fc region is fused to the C-terminus of the IL-2 variant. In an embodiment, the IL-2 fusion protein further comprises a linker. In an embodiment, the linker comprises (G₄S)₄ (SEQ ID NO: 48). In an embodiment, the fusion protein comprises an amino acid sequence of any of SEQ ID NOs: 1004, 1005, 1006, 1007, 1008, or 1009, an amino acid sequence that is at least 95% identical thereto or differs by no more than 1, 2, 3, 4, 5, 6, 7, 8, 9, or 10 amino acids therefrom, or a functional fragment thereof. In an embodiment, the fusion protein forms a dimer.

[0023] In an aspect, the disclosure features a method of selectively increasing p-STAT5 signaling, comprising administering to a subject in need thereof an effective amount of an IL-2 agent described herein, such that the level of p-STAT5 signaling in a Treg cell from the subject is increased and the level of p-STAT5 signaling in a NK cell and/or a cytotoxic T cell from the subject is not substantially increased, thereby selectively increasing p-STAT5 signaling.

[0024] In an embodiment, the level of p-STAT5 signaling in the Treg cell is increased by at least 2, 3, 4, 5, 6, 7, 8, 9, or 10 fold. In an embodiment, the level of p-STAT signaling in the NK cell and/or cytotoxic T cell is increased by no more than 50%, 40%, 30%, 20%, or 10%.

[0025] In an embodiment, the disorder is, or the subject has, a disorder described herein. In an embodiment, the disorder is, or the subject has, lupus nephritis. In an embodiment, the disorder is, or the subject has, psoriasis. In an embodiment, the disorder is, or the subject has, an autoimmune disorder, e.g., an autoimmune disorder described herein. In an embodiment, the disorder is, or the subject has, systemic lupus erythematosus (SLE), autoimmune hepatitis (AIH), immune-related focal segmented glomerulosclerosis (IM-FSGS), or alopecia areata (AA).

[0026] In an embodiment, the method further comprises determining the level of p-STAT5 signaling in an immune cell (e.g., in a T reg cell, an NK cell, and/or a cytotoxic T cell) from the subject. In an embodiment, the method further comprises isolating a blood cell (e.g., a PBMC) from the subject.

[0027] In an embodiment, the determining step is performed prior to, during, and/or subsequent to the contacting or administering step. In an embodiment, the level of p-STAT5 signaling is determined using a flow cytometry-based p-STAT5 assay, e.g., as described in Example 13.

[0028] In an embodiment, the IL-2 agent comprises an IL-2 variant comprising: (i) the amino acid substitution H16L or H16N, and/or the amino acid substitution I92S, and (ii) the amino acid substitutions V69A, Q74P, and C125S, corresponding to human IL-2 (SEQ ID NO: 1031). In an embodiment, the IL-2 variant further comprises the amino acid substitution T3A. In an embodiment, the IL-2 variant comprises the amino acid sequence of any of SEQ ID NOs: 4, 5, 11, 1000, 1001, or 1002, an amino acid sequence that is at least 95% identical thereto or differs by no more than 1, 2, 3, 4, or 5 amino acids therefrom, or a functional fragment thereof.

[0029] In an embodiment, the IL-2 agent comprises an IL-2 fusion protein comprising the IL-2 variant. In an embodiment, the IL-2 fusion protein further comprises an Fc region. In an embodiment, the Fc region comprises an Fc region of IgG1 allotype m3 comprising an N297G substitution according to EU numbering. In an embodiment, the Fc region comprises the amino acid sequence of SEQ ID NO: 1003, or an amino acid sequence that is at least 95% identical thereto or differs by no more than 1, 2, 3, 4, 5, 6, 7, 8, 9, or 10 amino acids therefrom, or a functional fragment thereof. In an embodiment, the Fc region is fused to the C-terminus of the IL-2 variant. In an embodiment, the IL-2 fusion protein further comprises a linker. In an embodiment, the linker comprises (G₄S)₄ (SEQ ID NO: 48). In an embodiment, the fusion protein comprises an amino acid sequence of any of SEQ ID NOs: 1004, 1005, 1006, 1007, 1008, or 1009, an amino acid sequence that is at least 95% identical thereto or differs by no more than 1, 2, 3, 4, 5, 6, 7, 8, 9, or 10 amino acids therefrom, or a functional fragment thereof. In an embodiment, the fusion protein forms a dimer.

[0030] In an aspect, the disclosure features a method of treating immune-related focal segmented glomerulosclerosis (IM-FSGS), comprising administering to a subject in need thereof an effective amount of an IL-2 agent described herein, thereby treating the disorder.

[0031] In an embodiment, the IL-2 agent comprises an IL-2 variant comprising: (i) the amino acid substitution H16L or H16N, and/or the amino acid substitution I92S, and (ii) the amino acid substitutions V69A, Q74P, and C125S, corresponding to human IL-2 (SEQ ID NO: 1031). In an embodiment, the IL-2 variant further comprises the amino acid substitution T3A. In an embodiment, the IL-2 variant comprises the amino acid sequence of any of SEQ ID NOs: 4, 5, 11, 1000, 1001, or 1002, an amino acid sequence that is at least 95% identical thereto or differs by no more than 1, 2, 3, 4, or 5 amino acids therefrom, or a functional fragment thereof.

[0032] In an embodiment, the IL-2 agent comprises an IL-2 fusion protein comprising the IL-2 variant. In an embodiment, the IL-2 fusion protein further comprises an Fc region. In an embodiment, the Fc region comprises an Fc region of IgG1 allotype m3 comprising an N297G substitution according to EU numbering. In an embodiment, the Fc region comprises the amino acid sequence of SEQ ID NO: 1003, or an amino acid sequence that is at least 95% identical thereto or differs by no more than 1, 2, 3, 4, 5, 6, 7, 8, 9, or 10 amino acids therefrom, or a functional fragment thereof. In an embodiment, the Fc region is fused to the C-terminus of the IL-2 variant. In an embodiment, the IL-2 fusion protein further comprises a linker. In an embodiment, the linker comprises (G₄S)₄ (SEQ ID NO: 48). In an embodiment, the fusion protein comprises an amino acid sequence of any of SEQ ID NOs: 1004, 1005, 1006, 1007, 1008, or 1009, an amino acid sequence that is at least 95% identical thereto or differs by no more than 1, 2, 3, 4, 5, 6, 7, 8, 9, or 10 amino acids therefrom, or a functional fragment thereof. In an embodiment, the fusion protein forms a dimer.

### Additional Embodiments

[0033] The present disclosure is based, at least in part, on the discovery that a combination of mutations in IL-2 that stabilize the protein, reduce its affinity for CD122 (e.g., CD122/CD132 heterodimer), and/or reduce or have no more than a minimal effect on its affinity for CD25, can be used to selectively enhance regulatory T cell (Treg) activity through the IL-2 pathway, and therefore achieve advantageous therapeutic effects for treating disorders and conditions such as autoimmune diseases. IL-2 agents comprising such mutations are suitable for treating conditions arising from abnormal immune responses, such as autoimmune diseases.

[0034] Accordingly, in certain aspects, this disclosure provides an IL-2 agent, e.g., an IL-2 agent having one or more (e.g., 1, 2, 3, 4, 5, 6, 7, 8, 9, 10, 11, 12, 13, 14, 15, 16, 17, 18, 19, 20, 21, 22, 23, or all) of the following properties a)-x):
[0035] a) Expresses at a higher or increased level in vitro and/or in vivo, e.g., increased by about 1%, about 2%, about 3%, about 4%, about 5%, about 10%, about 15%, about 20%, about 25%, about 30%, about 35%, about 40%, about 45%, about 50%, about 55%, about 60%, about 65%, about 70%, about 75%, about 80%, about 85%, about 90%, about 95%, about 100%, or more, or by increased by about 0.5-fold, about 1-fold, about 1.5-fold, about 2-fold, about 2.5-fold, about 3-fold, about 3.5-fold, about 4-fold, about 4.5-fold, about 5-fold, about 5.5-fold, about 6-fold, about 6.5-fold, about 7-fold, about 7.5-fold, about 8-fold, about 8.5-fold, about 9-fold, about 9.5-fold, about 10-fold, or more, e.g., relative to an IL-2 agent comprising a wild-type IL-2 or an IL-2 agent comprising a reference IL-2 variant, e.g., as by an assay of protein concentration;
[0036] b) Aggregates at lower or decreased level in vitro and/or in vivo, e.g., decreased by about 1%, about 2%, about 3%, about 4%, about 5%, about 10%, about 15%, about 20%, about 25%, about 30%, about 35%, about 40%, about 45%, about 50%, about 55%, about 60%, about 65%, about 70%, about 75%, about 80%, about 85%, about 90%, about 95%, about 100%, or more, or decreased by about 0.5-fold, about 1-fold, about 1.5-fold, about 2-fold, about 2.5-fold, about 3-fold, about 3.5-fold, about 4-fold, about 4.5-fold, about 5-fold, about 5.5-fold, about 6-fold, about 6.5-fold, about 7-fold, about 7.5-fold, about 8-fold, about 8.5-fold, about 9-fold, about 9.5-fold, about 10-fold, or more e.g., relative to an IL-2 agent comprising a wild-type IL-2 or an IL-2 agent comprising a reference IL-2 variant, e.g., as determined by melting temperature analysis (e.g., using fluorimetry), dynamic light scattering, and/or size-exclusion chromatography;
[0037] c) Has enhanced or increased stability in vitro and/or in vivo, e.g., increased by about 1%, about 2%, about 3%, about 4%, about 5%, about 10%, about 15%, about 20%, about 25%, about 30%, about 35%, about 40%, about 45%, about 50%, about 55%, about 60%, about 65%, about 70%, about 75%, about 80%, about 85%, about 90%, about 95%, about 100%, or more, or increased by about 0.5-fold, about 1-fold, about 1.5-fold, about 2-fold, about 2.5-fold, about 3-fold, about 3.5-fold, about 4-fold, about 4.5-fold, about 5-fold, about 5.5-fold, about 6-fold, about 6.5-fold, about 7-fold, about 7.5-fold, about 8-fold, about 8.5-fold, about 9-fold, about 9.5-fold, about 10-fold, or more, e.g., relative to an IL-2 agent comprising a wild-type IL-2 or an IL-2 agent comprising a reference IL-2 variant, e.g., as determined by expression in yeast surface display, expression in mammalian cells, chromatography, circular dichroism or related spectroscopic technical, and/or melting temperature analysis (e.g., using fluorimetry);
[0038] d) Has enhanced or increased half-life in vitro and/or in vivo, e.g., increased by about 1%, about 2%, about 3%, about 4%, about 5%, about 10%, about 15%, about 20%, about 25%, about 30%, about 35%, about 40%, about 45%, about 50%, about 55%, about 60%, about 65%, about 70%, about 75%, about 80%, about 85%, about 90%, about 95%, about 100%, or more, or greater than about 0.5-fold, about 1-fold, about 1.5-fold, about 2-fold, about 2.5-fold, about 3-fold, about 3.5-fold, about 4-fold, about 4.5-fold, about 5-fold, about 5.5-fold, about 6-fold, about 6.5-fold, about 7-fold, about 7.5-fold, about 8-fold, about 8.5-fold, about 9-fold, about 9.5-fold, about 10-fold, or more, e.g., relative to an IL-2 agent comprising a wild-type IL-2 or an IL-2 agent comprising a reference IL-2 variant, e.g., as determined by ELISA, flow cytometry, and/or mass spectrometry;
[0039] e) Has a lower, reduced or decreased rate or level of turnover and/or clearance in vivo, e.g., decreased by about 1%, about 2%, about 3%, about 4%, about 5%, about 10%, about 15%, about 20%, about 25%, about 30%, about 35%, about 40%, about 45%, about 50%, about 55%, about 60%, about 65%, about 70%, about 75%, about 80%, about 85%, about 90%, about 95%, about 100%, or more, or decreased by about 0.5-fold, about 1-fold, about 1.5-fold, about 2-fold, about 2.5-fold, about 3-fold, about 3.5-fold, about 4-fold, about 4.5-fold, about 5-fold, about 5.5-fold, about 6-fold, about 6.5-fold, about 7-fold, about 7.5-fold, about 8-fold, about 8.5-fold, about 9-fold, about 9.5-fold, about 10-fold, or more, e.g., relative to an IL-2 agent comprising a wild-type IL-2 or an IL-2 agent comprising a reference IL-2 variant, e.g., as determined by ELISA, flow cytometry, and/or mass spectrometry;
[0040] f) Has reduced or decreased or substantially unchanged binding affinity for CD25 (e.g., human CD25), e.g., decreased by about 1%, about 2%, about 3%, about 4%, about 5%, about 10%, about 15%, about 20%, about 25%, about 30%, about 35%, about 40%, about 45%, about 50%, about 55%, about 60%, about 65%, about 70%, about 75%, about 80%, about 85%, about 90%, about 95%, about 100%, or more (e.g., about 1% to about 20%, about 2% to about 15%, or about 5% to about 10%), or decreased or increased by no more than about 1%, about 2%, about 3%, about 4%, about 5%, about 10%, about 15%, about 20%, about 25%, about 30%, about 35%, about 40%, about 45%, or about 50%, or decreased by about 0.5-fold, about 1-fold, about 1.5-fold, about 2-fold, about 2.5-fold, about 3-fold, about 3.5-fold, about 4-fold, about 4.5-fold, about 5-fold, about 5.5-fold, about 6-fold, about 6.5-fold, about 7-fold, about 7.5-fold, about 8-fold, about 8.5-fold, about 9-fold, about 9.5-fold, about 10-fold, or more, or decreased or increased by no more than about 0.5-fold, about 1-fold, about 1.5-fold, about 2-fold, about 2.5-fold, about 3-fold, about 3.5-fold, about 4-fold, about 4.5-fold, or about 5-fold, e.g., relative to an IL-2 agent comprising a wild-type IL-2 or an IL-2 agent comprising a reference IL-2 variant e.g., as determined by yeast surface display, bio-layer interferometry (e.g. Octet binding), and/or surface plasmon resonance (e.g. Biacore);
[0041] g) Binds to CD25 (e.g., human CD25) with low affinity, e.g., with a dissociation constant (K_{D}) of about 5-500 pM, e.g., about 5, about 10, about 15, about 20, about 25, about 30, about 35, about 40, about 45, about 50, about 55, about 60, about 65, about 70, about 75, about 80, about 85, about 90, about 95, about 100, about 105, about 110, about 115, about 120, about 125, about 130, about 135, about 140, about 145, about 150, about 200, about 250, about 300, about 350, about 400, about 450, or about 500 pM, or e.g., about 10 pM to about 490 pM, about 20 pM to about 480 pM, about 30 pM to about 470 pM, about 40 pM to about 460 pM, about 50 pM to about 450 pM, about 60 pM to about 440 pM, about 70 pM to about 430 pM, about 80 pM to about 420 pM, about 90 pM to about 410 pM, about 100 pM to about 400 pM, about 110 pM to about 390 pM, about 120 pM to about 380 pM, about 130 pM to about 370 pM, about 140 pM to about 360 pM, about 150 pM to about 350 pM, about 160 pM to about 340 pM, about 170 pM to about 330 pM, about 180 pM to about 320 pM, about 190 pM to about 310 pM, about 200 pM to about 300 pM, about 210 pM to about 290 pM, about 220 pM to about 280 pM, about 230 pM to about 270 pM, about 240 pM to about 260 pM, or e.g., about 5 pM to about 450 pM, about 5 pM to about 400 pM, about 5 pM to about 350 pM, about 5 pM to about 300 pM, about 5 pM to about 250 pM, about 5 pM to about 200 pM, about 5 pM to about 150 pM, about 5 pM to about 100 pM, about 5 pM to about 50 pM, or e.g., about 10 pM to about 500 pM, about 20 pM to about 500 pM, about 50 pM to about 500 pM, about 100 pM to about 500 pM, about 150 pM to about 500 pM, about 200 pM to about 500 pM, about 250 pM to about 500 pM, about 300 pM to about 500 pM, about 350 pM to about 500 pM, about 400 pM to about 500 pM, about 450 pM to about 500 pM, or e.g., greater than about 5, about 10, about 15, about 20, about 25, about 30, about 35, about 40, about 45, about 50, about 55, about 60, about 65, about 70, about 75, about 80, about 85, about 90, about 95, about 100, about 105, about 110, about 115, about 120, about 125, about 130, about 135, about 140, about 145, about 150, about 200, about 250, about 300, about 350, about 400, about 450, or about 500 pM, e.g. as determined yeast surface display;
[0042] h) Binds to CD25 (e.g., human CD25) with low affinity, e.g., with a dissociation constant (K_{D}) of about 0.1-10 nM, e.g., about 0.1, about 0.2, about 0.3, about 0.4, about 0.5, about 0.6, about 0.7, about 0.8, about 0.9, about 1, about 1.5, about 2, about 2.5, about 3, about 3.5, about 4, about 4.5, about 5, about 6, about 7, about 8, about 9, or about 10 nM, or e.g., about 0.1 to about 9 nM, about 0.1 to about 8 nM, about 0.1 to about 7 nM, or about 0.1 to about 6 nM, e.g., about 0.1 to about 5 nM, about 0.1 to about 4 nM, about 0.1 to about 3 nM, about 0.1 to about 2 nM, about 0.1 to about 1 nM, or about 0.1 to about 0.5 nM, or e.g., about 0.1 to about 10 nM, about 0.5 to about 10 nM, about 1 to about 10 nM, about 1.5 to about 10 nM, about 2 to about 10 nM, about 2.5 to about 10 nM, about 3 to about 10 nM, about 3.5 to about 10 nM, about 4 to about 10 nM, about 4.5 to about 10 nM, about 5 to about 10 nM, about 5.5 to about 10 nM, about 6 to about 10 nM, about 6.5 to about 10 nM, about 7 to about 10 nM, about 7.5 to about 10 nM, about 8 to about 10 nM, about 8.5 to about 10 nM, about 9 to about 10 nM, or about 9.5 to about 10 nM, or e.g., about 0.1 to about 9.5 nM, about 0.5 to about 9 nM, about 1 to about 8.5 nM, about 1.5 to about 8 nM, about 2 to about 7.5 nM, about 2.5 to about 7 nM, about 3 to about 6.5 nM, about 3.5 to about 6 nM, about 4 to about 5.5 nM, or about 4.5 to about 5 nM, or e.g., greater than about 0.1, about 0.2. about 0.3, about 0.4, about 0.5, about 0.6, about 0.7, about 0.8, about 0.9, about 1, about 2, about 3, about 4, about 5, about 6, about 7, about 8, about 9, or about 10 nM, e.g., as determined by bio-layer interferometry (e.g., Octet binding) and/or surface plasmon resonance (e.g. Biacore);
[0043] i) Has reduced or decreased binding affinity for CD122/CD132 heterodimer (e.g., human CD122/CD132 heterodimer), e.g., decreased by about 1%, about 2%, about 3%, about 4%, about 5%, about 10%, about 15%, about 20%, about 25%, about 30%, about 35%, about 40%, about 45%, about 50%, about 55%, about 60%, about 65%, about 70%, about 75%, about 80%, about 85%, about 90%, about 95%, about 100%, or more (e.g., about 1% to about 50%, about 2% to about 40%, about 3% to about 30%, about 4% to about 20%, or about 5% to about 10%, about 1% to about 40%, about 1% to about 30%, about 1% to about 20%, about 1% to about 10%, about 40% to about 50%, about 30% to about 50%, about 20% to about 50%, about 10% to about 50%, about 10% to about 20%, about 20% to about 30%, about 30% to about 40%, about 10% to about 30%, or 20% to about 40%), or decreased by about 0.5-fold, about 1-fold, about 1.5-fold, about 2-fold, about 2.5-fold, about 3-fold, about 3.5-fold, about 4-fold, about 4.5-fold, about 5-fold, about 5.5-fold, about 6-fold, about 6.5-fold, about 7-fold, about 7.5-fold, about 8-fold, about 8.5-fold, about 9-fold, about 9.5-fold, about 10-fold, or more (e.g., about 0.5-fold to about 5-fold, about 1-fold to about 4-fold, or about 2-fold to about 3-fold), e.g., relative to an IL-2 agent comprising a wild-type IL-2 or an IL-2 agent comprising a reference IL-2 variant e.g., as determined by yeast surface display, bio-layer interferometry (e.g. Octet binding), and/or surface plasmon resonance (e.g. Biacore);
[0044] j) Binds to CD122/CD132 heterodimer (e.g., human CD122/CD132 heterodimer) with low affinity, e.g., with a dissociation constant (K_{D}) of about 0.2-20 nM, e.g., about 0.2, about 0.3, about 0.4, about 0.5, about 0.6, about 0.7, about 0.8, about 0.9, about 1, about 1.1, about 1.2, about 1.3, about 1.4. about 1.5, about 2, about 3, about 4, about 5, about 6, about 7, about 8, about 9, about 10, about 11, about 12, about 13, about 14, about 15, about 16, about 17, about 18, or about 20 nM, or e.g., about 0.2 to about 19 nM, about 0.2 to about 18 nM, about 0.2 to about 17 nM, or about 0.2 to about 16 nM, e.g., about 0.2 to about 15 nM, about 0.1 to about 4 nM, about 0.1 to about 3 nM, about 0.1 to about 2 nM, about 0.1 to about 1 nM, or about 0.1 to about 0.5 nM, or e.g., about 0.1 to about 10 nM, about 0.5 to about 10 nM, about 1 to about 10 nM, about 1.5 to about 10 nM, about 2 to about 10 nM, about 2.5 to about 10 nM, about 3 to about 10 nM, about 3.5 to about 10 nM, about 4 to about 10 nM, about 4.5 to about 10 nM, about 5 to about 10 nM, about 5.5 to about 10 nM, about 6 to about 10 nM, about 6.5 to about 10 nM, about 7 to about 10 nM, about 7.5 to about 10 nM, about 8 to about 10 nM, about 8.5 to about 10 nM, about 9 to about 10 nM, or about 9.5 to about 10 nM, or e.g., about 0.1 to about 9.5 nM, about 0.5 to about 9 nM, about 1 to about 8.5 nM, about 1.5 to about 8 nM, about 2 to about 7.5 nM, about 2.5 to about 7 nM, about 3 to about 6.5 nM, about 3.5 to about 6 nM, about 4 to about 5.5 nM, or about 4.5 to about 5 nM, or e.g., greater than about 0.2, about 0.3, about 0.4, about 0.5, about 0.6, about 0.7, about 0.8, about 0.9, about 1, about 1.1, about 1.2, about 1.3, about 1.4. about 1.5, about 2, about 3, about 4, about 5, about 6, about 7, about 8, about 9, about 10, about 11, about 12, about 13, about 14, about 15, about 16, about 17, about 18, or about 20 nM, e.g., as determined by yeast surface display.
[0045] k) Binds to CD122/CD132 heterodimer (e.g., human CD122/CD132 heterodimer) with low affinity, e.g., with a dissociation constant (K_{D}) of about 0.2-300 nM, e.g., about 0.2 nM, about 0.5 nM, about 1 nM, about 2 nM, about 5 nM, about 10 nM, about 15 nM, about 20 nM, about 25 nM, about 30 nM, about 40 nM, about 50 nM, about 60 nM, about 70 nM, about 80 nM, about 90 nM, about 100 nM, about 110 nM, about 120 nM, about 130 nM, about 140 nM, about 150 nM, about 160 nM, about 170 nM, about 180 nM, about 190 nM, about 200 nM, about 210 nM, about 220 nM, about 230 nM, about 240 nM, about 250 nM, about 260 nM, about 270 nM, about 280 nM, about 290 nM, or about 300 nM, or e.g., About 0.2 to about 280 nM, about 0.2 to about 260 nM, about 0.2 to about 240 nM, about 0.2 to about 220 nM, about 0.2 to about 200 nM, about 0.2 to about 180 nM, about 0.2 to about 160 nM, about 0.2 to about 140 nM, about 0.2 to about 120 nM, about 0.2 to about 100 nM, about 0.2 to about 80 nM, about 0.2 to about 60 nM, about 0.2 to about 40 nM, about 0.2 to about 20 nM, or e.g., about 0.5 to about 300 nM, about 1 to about 300 nM, about 5 to about 300 nM, about 10 to about 300 nM, about 20 to about 300 nM, about 40 to about 300 nM, about 60 to about 300 nM, about 80 to about 300 nM, about 100 to about 300 nM, about 120 to about 300 nM, about 140 to about 300 nM, about 160 to about 300 nM, about 180 to about 300 nM, about 200 to about 300 nM, about 220 to about 300 nM, about 240 to about 300 nM, about 260 to about 300 nM, about 280 to about 300 nM, or e.g., about 0.5 to about 280 nM, about 1 to about 260 nM, about 5 to about 240 nM, about 10 to about 220 nM, about 20 to about 200 nM, about 40 to about 180 nM, about 60 to about 160 nM, about 80 to about 140 mM, about 100 to about 120 nM, or e.g., greater than about 0.2, about 0.5, about 1, about 2, about 5, about 10, about 15, about 20 nM, about 25 nM, about 30 nM, about 40 nM, about 50 nM, about 60 nM, about 70 nM, about 80 nM, about 90 nM, about 100 nM, about 110 nM, about 120 nM, about 130 nM, about 140 nM, about 150 nM, about 160 nM, about 170 nM, about 180 nM, about 190 nM, about 200 nM, about 210 nM, about 220 nM, about 230 nM, about 240 nM, about 250 nM, about 260 nM, about 270 nM, about 280 nM, about 290 nM, or greater than about 300 nM, e.g., as determined by biolayer interferometry (e.g. Octet binding) and/or surface plasmon resonance (e.g. Biacore);
[0046] l) Selectively activates IL-2 signaling in T regulatory cells in vitro and/or in vivo, e.g., having an T helper EC₅₀/Treg EC₅₀ ratio greater than about 1, about 2, about 3, about 4, about 5, about 6, about 7, about 8, about 9, about 10, about 11, about 12, about 13, about 14, about 15, about 16, about 17, about 18, about 19, about 20, about 21, about 22, about 23, about 24, about 25, about 26, about 27, about 28, about 29, about 30, about 35, about 40, about 45, about 50, about 55, about 60, about 65, about 70, about 75, about 80, about 85, about 90, about 95, about 100, about 150, about 200, about 250, about 300, about 350, about 400, about 450, about 500, about 600, about 700, about 800, about 900, about 1000, about 1500, about 2000, about 2500, or about 3000, or more, or e.g., greater than 1 and about 1 to 2, about 2 to 3, about 3 to 4, about 4 to 5, greater than 1 and about 1 to 10, greater than 1 and about 1 to 20, greater than 1 and about 1 to 30, greater than 1 and about 1 to 40, greater than 1 and about 1 to 50, about 2 to 10, about 2 to 20, about 2 to 30, about 2 to 40, 2 to 50, about 5 to 10, about 5 to 20, about 5 to 30, about 5 to 40, about 5 to 50, about 10 to 20, about 10 to 30, about 10 to 40 about 10 to 50, about 20 to 40, about 20 to 50, about 50 to 100, about 100 to 200, about 200 to 500, about 500 to 1000, about 1000 to 2000, or about 1000 to 3000, relative to an IL-2 agent comprising a wild-type IL-2 or an IL-2 agent comprising a reference IL-2 variant e.g., as determined flow cytometry;
[0047] m) Selectively activates IL-2 signaling in T regulatory cells in vitro and/or in vivo, e.g., having an NK cell EC₅₀/Treg EC₅₀ ratio greater than about 1, about 2, about 3, about 4, about 5, about 6, about 7, about 8, about 9, about 10, about 11, about 12, about 13, about 14, about 15, about 16, about 17, about 18, about 19, about 20, about 21, about 22, about 23, about 24, about 25, about 26, about 27, about 28, about 29, about 30, about 35, about 40, about 45, about 50, about 55, about 60, about 65, about 70, about 75, about 80, about 85, about 90, about 95, about 100, about 150, about 200, about 250, about 300, about 350, about 400, about 450, about 500, about 600, about 700, about 800, about 900, about 1000, about 1500, about 2000, about 2500, or about 3000, or more, or e.g., greater than 1 and about 1 to 2, about 2 to 3, about 3 to 4, about 4 to 5, greater than 1 and about 1 to 10, greater than 1 and about 1 to 20, greater than 1 and about 1 to 30, greater than 1 and about 1 to 40, greater than 1 and about 1 to 50, about 2 to 10, about 2 to 20, about 2 to 30, about 2 to 40, 2 to 50, about 5 to 10, about 5 to 20, about 5 to 30, about 5 to 40, about 5 to 50, about 10 to 20, about 10 to 30, about 10 to 40 about 10 to 50, about 20 to 40, about 20 to 50, about 50 to 100, about 100 to 200, about 200 to 500, about 500 to 1000, about 1000 to 2000, or about 1000 to 3000, relative to an IL-2 agent comprising a wild-type IL-2 or an IL-2 agent comprising a reference IL-2 variant e.g., as determined flow cytometry;
[0048] n) (i) Has enhanced or increased potency and/or ability to induce or promote T regulatory cell activity, e.g., having an EC₅₀ for Tregs that is lower by about 1%, about 2%, about 3%, about 4%, about 5%, about 10%, about 15%, about 20%, about 25%, about 30%, about 35%, about 40%, about 45%, about 50%, about 55%, about 60%, about 65%, about 70%, about 75%, about 80%, about 85%, about 90%, about 95%, about 100% or more, or e.g., decreased by about 0.5-fold, about 1-fold, about 1.5-fold, about 2-fold, about 2.5-fold, about 3-fold, about 3.5-fold, about 4-fold, about 4.5-fold, about 5-fold, about 5.5-fold, about 6-fold, about 6.5-fold, about 7-fold, about 7.5-fold, about 8-fold, about 8.5-fold, about 9-fold, about 9.5-fold, about 10-fold or more e.g., relative to an IL-2 agent comprising a wild-type IL-2 or an IL-2 agent comprising a reference IL-2 variant e.g., as determined flow cytometry, a T regulatory cell proliferation or expansion assay in vitro or in vivo, and/or a T cell suppression assay;
   [0049] (ii) Has reduced or decreased potency and/or ability to induce or promote T regulatory cell activity, e.g., having an EC₅₀ for Tregs that is higher by about 1%, about 2%, about 3%, about 4%, about 5%, about 10%, about 15%, about 20%, about 25%, about 30%, about 35%, about 40%, about 45%, about 50%, about 55%, about 60%, about 65%, about 70%, about 75%, about 80%, about 85%, about 90%, about 95%, about 100% or more, or e.g., decreased by about 0.5-fold, about 1-fold, about 1.5-fold, about 2-fold, about 2.5-fold, about 3-fold, about 3.5-fold, about 4-fold, about 4.5-fold, about 5-fold, about 5.5-fold, about 6-fold, about 6.5-fold, about 7-fold, about 7.5-fold, about 8-fold, about 8.5-fold, about 9-fold, about 9.5-fold, about 10-fold, about 50-fold, about 100-fold, about 200-fold, about 500-fold, about 1000-fold, about 2000-fold, about 5000-fold, about 10,000-fold, about 15,000-fold, about 20,000-fold or more e.g., relative to an IL-2 agent comprising a wild-type IL-2 or an IL-2 agent comprising a reference IL-2 variant e.g., as determined flow cytometry, a T regulatory cell proliferation or expansion assay in vitro or in vivo, and/or a T cell suppression assay;
[0050] o) Modulates (e.g., reduces (e.g., inhibits, blocks, or neutralizes) or increases (e.g., activates, initiates, or enhances) one or more biological activities of a T cell (e.g., Treg), in vitro, ex vivo, or in vivo;
[0051] p) Shows the same or similar binding affinity or specificity, or both, as an IL-2 agent described herein;
[0052] q) Shows the same or similar binding affinity or specificity, or both, as an IL-2 agent comprising one or more (e.g., 2, 3, 4, 5, 6, 7, 8, 9, 10, or more) alterations (e.g., substitutions) described herein;
[0053] r) Shows the same or similar binding affinity or specificity, or both, as an IL-2 agent comprising an amino acid sequence described herein;
[0054] s) Shows the same or similar binding affinity or specificity, or both, as an IL-2 agent comprising an amino acid sequence encoded by a nucleotide sequence described herein;
[0055] t) Inhibits, e.g., competitively inhibits, the binding of a second IL-2 agent to an IL-2 receptor, wherein the second IL-2 agent is an IL-2 agent described herein,
[0056] u) Competes for binding to an IL-2 receptor with a second IL-2 agent, wherein the second IL-2 agent is an IL-2 agent described herein;
[0057] v) Has one or more biological properties of an IL-2 agent described herein;
[0058] w) Has one or more structural properties of an IL-2 agent described herein; or
[0059] x) Has one or more pharmacokinetic properties of an IL-2 agent described herein.

[0060] In an embodiment, the IL-2 agent is expresses at a higher or increased level in vitro and/or in vivo, e.g., increased by about 1%, about 2%, about 3%, about 4%, about 5%, about 10%, about 15%, about 20%, about 25%, about 30%, about 35%, about 40%, about 45%, about 50%, about 55%, about 60%, about 65%, about 70%, about 75%, about 80%, about 85%, about 90%, about 95%, about 100%, or more, or by increased by about 0.5-fold, about 1-fold, about 1.5-fold, about 2-fold, about 2.5-fold, about 3-fold, about 3.5-fold, about 4-fold, about 4.5-fold, about 5-fold, about 5.5-fold, about 6-fold, about 6.5-fold, about 7-fold, about 7.5-fold, about 8-fold, about 8.5-fold, about 9-fold, about 9.5-fold, about 10-fold, or more, e.g., relative to an IL-2 agent comprising a wild-type IL-2 or an IL-2 agent comprising a reference IL-2 variant, e.g., as by an assay of protein concentration. In an embodiment, the IL2-agent aggregates at lower or decreased level in vitro and/or in vivo, e.g., decreased by about 1%, about 2%, about 3%, about 4%, about 5%, about 10%, about 15%, about 20%, about 25%, about 30%, about 35%, about 40%, about 45%, about 50%, about 55%, about 60%, about 65%, about 70%, about 75%, about 80%, about 85%, about 90%, about 95%, about 100%, or more, or decreased by about 0.5-fold, about 1-fold, about 1.5-fold, about 2-fold, about 2.5-fold, about 3-fold, about 3.5-fold, about 4-fold, about 4.5-fold, about 5-fold, about 5.5-fold, about 6-fold, about 6.5-fold, about 7-fold, about 7.5-fold, about 8-fold, about 8.5-fold, about 9-fold, about 9.5-fold, about 10-fold, or more e.g., relative to an IL-2 agent comprising a wild-type IL-2 or an IL-2 agent comprising a reference IL-2 variant, e.g., as determined by melting temperature analysis (e.g., using fluorimetry), dynamic light scattering, and/or size-exclusion chromatography.

[0061] In an embodiment, the IL-2 agent has enhanced or increased stability in vitro and/or in vivo, e.g., increased by about 1%, about 2%, about 3%, about 4%, about 5%, about 10%, about 15%, about 20%, about 25%, about 30%, about 35%, about 40%, about 45%, about 50%, about 55%, about 60%, about 65%, about 70%, about 75%, about 80%, about 85%, about 90%, about 95%, about 100%, or more, or increased by about 0.5-fold, about 1-fold, about 1.5-fold, about 2-fold, about 2.5-fold, about 3-fold, about 3.5-fold, about 4-fold, about 4.5-fold, about 5-fold, about 5.5-fold, about 6-fold, about 6.5-fold, about 7-fold, about 7.5-fold, about 8-fold, about 8.5-fold, about 9-fold, about 9.5-fold, about 10-fold, or more, e.g., relative to an IL-2 agent comprising a wild-type IL-2 or an IL-2 agent comprising a reference IL-2 variant, e.g., as determined by expression in yeast surface display, expression in mammalian cells, chromatography, circular dichroism or related spectroscopic technical, and/or melting temperature analysis (e.g., using fluorimetry).

[0062] In an embodiment the IL-2 agent as enhanced or increased half-life in vitro and/or in vivo, e.g., increased by about 1%, about 2%, about 3%, about 4%, about 5%, about 10%, about 15%, about 20%, about 25%, about 30%, about 35%, about 40%, about 45%, about 50%, about 55%, about 60%, about 65%, about 70%, about 75%, about 80%, about 85%, about 90%, about 95%, about 100%, or more, or greater than about 0.5-fold, about 1-fold, about 1.5-fold, about 2-fold, about 2.5-fold, about 3-fold, about 3.5-fold, about 4-fold, about 4.5-fold, about 5-fold, about 5.5-fold, about 6-fold, about 6.5-fold, about 7-fold, about 7.5-fold, about 8-fold, about 8.5-fold, about 9-fold, about 9.5-fold, about 10-fold, or more, e.g., relative to an IL-2 agent comprising a wild-type IL-2 or an IL-2 agent comprising a reference IL-2 variant, e.g., as determined by ELISA, flow cytometry, and/or mass spectrometry.

[0063] In an embodiment, the IL-2 agent has a lower, reduced or decreased rate or level of turnover and/or clearance in vivo, e.g., decreased by about 1%, about 2%, about 3%, about 4%, about 5%, about 10%, about 15%, about 20%, about 25%, about 30%, about 35%, about 40%, about 45%, about 50%, about 55%, about 60%, about 65%, about 70%, about 75%, about 80%, about 85%, about 90%, about 95%, about 100%, or more, or decreased by about 0.5-fold, about 1-fold, about 1.5-fold, about 2-fold, about 2.5-fold, about 3-fold, about 3.5-fold, about 4-fold, about 4.5-fold, about 5-fold, about 5.5-fold, about 6-fold, about 6.5-fold, about 7-fold, about 7.5-fold, about 8-fold, about 8.5-fold, about 9-fold, about 9.5-fold, about 10-fold, or more, e.g., relative to an IL-2 agent comprising a wild-type IL-2 or an IL-2 agent comprising a reference IL-2 variant, e.g., as determined by ELISA, flow cytometry, and/or mass spectrometry.

[0064] In an embodiment, the IL-2 agent has reduced or decreased or substantially unchanged binding affinity for CD25 (e.g., human CD25), e.g., decreased by about 1%, about 2%, about 3%, about 4%, about 5%, about 10%, about 15%, about 20%, about 25%, about 30%, about 35%, about 40%, about 45%, about 50%, about 55%, about 60%, about 65%, about 70%, about 75%, about 80%, about 85%, about 90%, about 95%, about 100%, or more (e.g., about 1% to about 20%, about 2% to about 15%, or about 5% to about 10%), or decreased or increased by no more than about 1%, about 2%, about 3%, about 4%, about 5%, about 10%, about 15%, about 20%, about 25%, about 30%, about 35%, about 40%, about 45%, or about 50%, or decreased by about 0.5-fold, about 1-fold, about 1.5-fold, about 2-fold, about 2.5-fold, about 3-fold, about 3.5-fold, about 4-fold, about 4.5-fold, about 5-fold, about 5.5-fold, about 6-fold, about 6.5-fold, about 7-fold, about 7.5-fold, about 8-fold, about 8.5-fold, about 9-fold, about 9.5-fold, about 10-fold, or more, or decreased or increased by no more than about 0.5-fold, about 1-fold, about 1.5-fold, about 2-fold, about 2.5-fold, about 3-fold, about 3.5-fold, about 4-fold, about 4.5-fold, or about 5-fold, e.g., relative to an IL-2 agent comprising a wild-type IL-2 or an IL-2 agent comprising a reference IL-2 variant e.g., as determined by yeast surface display, bio-layer interferometry (e.g. Octet binding), and/or surface plasmon resonance (e.g. Biacore). In an embodiment, the reduction or decrease of binding affinity for CD25 is at least 10%, 20%, 30%, 40%, 50%, 60%, 70%, or 80% lower than the reduction or decrease of binding affinity for CD25. In an embodiment, the binding affinity for CD25 is not substantially reduced or decreased.

[0065] In an embodiment, the IL-2 agent binds to CD25 (e.g., human CD25) with low affinity, e.g., with a dissociation constant (KD) of about 5-500 pM, e.g., about 5, about 10, about 15, about 20, about 25, about 30, about 35, about 40, about 45, about 50, about 55, about 60, about 65, about 70, about 75, about 80, about 85, about 90, about 95, about 100, about 105, about 110, about 115, about 120, about 125, about 130, about 135, about 140, about 145, about 150, about 200, about 250, about 300, about 350, about 400, about 450, or about 500 pM, or e.g., about 10 pM to about 490 pM, about 20 pM to about 480 pM, about 30 pM to about 470 pM, about 40 pM to about 460 pM, about 50 pM to about 450 pM, about 60 pM to about 440 pM, about 70 pM to about 430 pM, about 80 pM to about 420 pM, about 90 pM to about 410 pM, about 100 pM to about 400 pM, about 110 pM to about 390 pM, about 120 pM to about 380 pM, about 130 pM to about 370 pM, about 140 pM to about 360 pM, about 150 pM to about 350 pM, about 160 pM to about 340 pM, about 170 pM to about 330 pM, about 180 pM to about 320 pM, about 190 pM to about 310 pM, about 200 pM to about 300 pM, about 210 pM to about 290 pM, about 220 pM to about 280 pM, about 230 pM to about 270 pM, about 240 pM to about 260 pM, or e.g., about 5 pM to about 450 pM, about 5 pM to about 400 pM, about 5 pM to about 350 pM, about 5 pM to about 300 pM, about 5 pM to about 250 pM, about 5 pM to about 200 pM, about 5 pM to about 150 pM, about 5 pM to about 100 pM, about 5 pM to about 50 pM, or e.g., about 10 pM to about 500 pM, about 20 pM to about 500 pM, about 50 pM to about 500 pM, about 100 pM to about 500 pM, about 150 pM to about 500 pM, about 200 pM to about 500 pM, about 250 pM to about 500 pM, about 300 pM to about 500 pM, about 350 pM to about 500 pM, about 400 pM to about 500 pM, about 450 pM to about 500 pM, or e.g., greater than about 5, about 10, about 15, about 20, about 25, about 30, about 35, about 40, about 45, about 50, about 55, about 60, about 65, about 70, about 75, about 80, about 85, about 90, about 95, about 100, about 105, about 110, about 115, about 120, about 125, about 130, about 135, about 140, about 145, about 150, about 200, about 250, about 300, about 350, about 400, about 450, or about 500 pM, e.g. as determined yeast surface display.

[0066] In an embodiment, the IL-2 agent binds to CD25 (e.g., human CD25) with low affinity, e.g., with a dissociation constant (KD) of about 0.1-10 nM, e.g., about 0.1, about 0.2, about 0.3, about 0.4, about 0.5, about 0.6, about 0.7, about 0.8, about 0.9, about 1, about 1.5, about 2, about 2.5, about 3, about 3.5, about 4, about 4.5, about 5, about 6, about 7, about 8, about 9, or about 10 nM, or e.g., about 0.1 to about 9 nM, about 0.1 to about 8 nM, about 0.1 to about 7 nM, or about 0.1 to about 6 nM, e.g., about 0.1 to about 5 nM, about 0.1 to about 4 nM, about 0.1 to about 3 nM, about 0.1 to about 2 nM, about 0.1 to about 1 nM, or about 0.1 to about 0.5 nM, or e.g., about 0.1 to about 10 nM, about 0.5 to about 10 nM, about 1 to about 10 nM, about 1.5 to about 10 nM, about 2 to about 10 nM, about 2.5 to about 10 nM, about 3 to about 10 nM, about 3.5 to about 10 nM, about 4 to about 10 nM, about 4.5 to about 10 nM, about 5 to about 10 nM, about 5.5 to about 10 nM, about 6 to about 10 nM, about 6.5 to about 10 nM, about 7 to about 10 nM, about 7.5 to about 10 nM, about 8 to about 10 nM, about 8.5 to about 10 nM, about 9 to about 10 nM, or about 9.5 to about 10 nM, or e.g., about 0.1 to about 9.5 nM, about 0.5 to about 9 nM, about 1 to about 8.5 nM, about 1.5 to about 8 nM, about 2 to about 7.5 nM, about 2.5 to about 7 nM, about 3 to about 6.5 nM, about 3.5 to about 6 nM, about 4 to about 5.5 nM, or about 4.5 to about 5 nM, or e.g., greater than about 0.1, about 0.2. about 0.3, about 0.4, about 0.5, about 0.6, about 0.7, about 0.8, about 0.9, about 1, about 2, about 3, about 4, about 5, about 6, about 7, about 8, about 9, or about 10 nM, e.g., as determined by bio-layer interferometry (e.g., Octet binding) and/or surface plasmon resonance (e.g. Biacore).

[0067] In an embodiment, the IL-2 agent has reduced or decreased binding affinity for CD122/CD132 heterodimer (e.g., human CD122/CD132 heterodimer), e.g., decreased by about 1%, about 2%, about 3%, about 4%, about 5%, about 10%, about 15%, about 20%, about 25%, about 30%, about 35%, about 40%, about 45%, about 50%, about 55%, about 60%, about 65%, about 70%, about 75%, about 80%, about 85%, about 90%, about 95%, about 100%, or more (e.g., about 1% to about 50%, about 2% to about 40%, about 3% to about 30%, about 4% to about 20%, or about 5% to about 10%, about 1% to about 40%, about 1% to about 30%, about 1% to about 20%, about 1% to about 10%, about 40% to about 50%, about 30% to about 50%, about 20% to about 50%, about 10% to about 50%, about 10% to about 20%, about 20% to about 30%, about 30% to about 40%, about 10% to about 30%, or 20% to about 40%), or decreased by about 0.5-fold, about 1-fold, about 1.5-fold, about 2-fold, about 2.5-fold, about 3-fold, about 3.5-fold, about 4-fold, about 4.5-fold, about 5-fold, about 5.5-fold, about 6-fold, about 6.5-fold, about 7-fold, about 7.5-fold, about 8-fold, about 8.5-fold, about 9-fold, about 9.5-fold, about 10-fold, or more (e.g., about 0.5-fold to about 5-fold, about 1-fold to about 4-fold, or about 2-fold to about 3-fold), e.g., relative to an IL-2 agent comprising a wild-type IL-2 or an IL-2 agent comprising a reference IL-2 variant e.g., as determined by yeast surface display, bio-layer interferometry (e.g. Octet binding), and/or surface plasmon resonance (e.g. Biacore). In an embodiment, the reduction or decrease of binding affinity for CD122/CD132 heterodimer is at least 1, 1.5, 2, 2.5, 3, 3.5, 4, 4.5, or 5-fold higher than the reduction or decrease of binding affinity for CD25. In an embodiment, the binding affinity for CD25 is not substantially reduced or decreased.

[0068] In an embodiment, the IL-2 agent binds to CD122/CD132 heterodimer (e.g., human CD122/CD132 heterodimer) with low affinity, e.g., with a dissociation constant (KD) of about 0.2-20 nM, e.g., about 0.2, about 0.3, about 0.4, about 0.5, about 0.6, about 0.7, about 0.8, about 0.9, about 1, about 1.1, about 1.2, about 1.3, about 1.4. about 1.5, about 2, about 3, about 4, about 5, about 6, about 7, about 8, about 9, about 10, about 11, about 12, about 13, about 14, about 15, about 16, about 17, about 18, or about 20 nM, or e.g., about 0.2 to about 19 nM, about 0.2 to about 18 nM, about 0.2 to about 17 nM, or about 0.2 to about 16 nM, e.g., about 0.2 to about 15 nM, about 0.1 to about 4 nM, about 0.1 to about 3 nM, about 0.1 to about 2 nM, about 0.1 to about 1 nM, or about 0.1 to about 0.5 nM, or e.g., about 0.1 to about 10 nM, about 0.5 to about 10 nM, about 1 to about 10 nM, about 1.5 to about 10 nM, about 2 to about 10 nM, about 2.5 to about 10 nM, about 3 to about 10 nM, about 3.5 to about 10 nM, about 4 to about 10 nM, about 4.5 to about 10 nM, about 5 to about 10 nM, about 5.5 to about 10 nM, about 6 to about 10 nM, about 6.5 to about 10 nM, about 7 to about 10 nM, about 7.5 to about 10 nM, about 8 to about 10 nM, about 8.5 to about 10 nM, about 9 to about 10 nM, or about 9.5 to about 10 nM, or e.g., about 0.1 to about 9.5 nM, about 0.5 to about 9 nM, about 1 to about 8.5 nM, about 1.5 to about 8 nM, about 2 to about 7.5 nM, about 2.5 to about 7 nM, about 3 to about 6.5 nM, about 3.5 to about 6 nM, about 4 to about 5.5 nM, or about 4.5 to about 5 nM, or e.g., greater than about 0.2, about 0.3, about 0.4, about 0.5, about 0.6, about 0.7, about 0.8, about 0.9, about 1, about 1.1, about 1.2, about 1.3, about 1.4. about 1.5, about 2, about 3, about 4, about 5, about 6, about 7, about 8, about 9, about 10, about 11, about 12, about 13, about 14, about 15, about 16, about 17, about 18, or about 20 nM, e.g., as determined by yeast surface display.

[0069] In an embodiment, the IL-2 agent binds to CD122/CD132 heterodimer (e.g., human CD122/CD132 heterodimer) with low affinity, e.g., with a dissociation constant (KD) of about 0.2-300 nM, e.g., about 0.2 nM, about 0.5 nM, about 1 nM, about 2 nM, about 5 nM, about 10 nM, about 15 nM, about 20 nM, about 25 nM, about 30 nM, about 40 nM, about 50 nM, about 60 nM, about 70 nM, about 80 nM, about 90 nM, about 100 nM, about 110 nM, about 120 nM, about 130 nM, about 140 nM, about 150 nM, about 160 nM, about 170 nM, about 180 nM, about 190 nM, about 200 nM, about 210 nM, about 220 nM, about 230 nM, about 240 nM, about 250 nM, about 260 nM, about 270 nM, about 280 nM, about 290 nM, or about 300 nM, or e.g., about 0.2 to about 280 nM, about 0.2 to about 260 nM, about 0.2 to about 240 nM, about 0.2 to about 220 nM, about 0.2 to about 200 nM, about 0.2 to about 180 nM, about 0.2 to about 160 nM, about 0.2 to about 140 nM, about 0.2 to about 120 nM, about 0.2 to about 100 nM, about 0.2 to about 80 nM, about 0.2 to about 60 nM, about 0.2 to about 40 nM, about 0.2 to about 20 nM, or e.g., about 0.5 to about 300 nM, about 1 to about 300 nM, about 5 to about 300 nM, about 10 to about 300 nM, about 20 to about 300 nM, about 40 to about 300 nM, about 60 to about 300 nM, about 80 to about 300 nM, about 100 to about 300 nM, about 120 to about 300 nM, about 140 to about 300 nM, about 160 to about 300 nM, about 180 to about 300 nM, about 200 to about 300 nM, about 220 to about 300 nM, about 240 to about 300 nM, about 260 to about 300 nM, about 280 to about 300 nM, or e.g., about 0.5 to about 280 nM, about 1 to about 260 nM, about 5 to about 240 nM, about 10 to about 220 nM, about 20 to about 200 nM, about 40 to about 180 nM, about 60 to about 160 nM, about 80 to about 140 mM, about 100 to about 120 nM, or e.g., greater than about 0.2, about 0.5, about 1, about 2, about 5, about 10, about 15, about 20 nM, about 25 nM, about 30 nM, about 40 nM, about 50 nM, about 60 nM, about 70 nM, about 80 nM, about 90 nM, about 100 nM, about 110 nM, about 120 nM, about 130 nM, about 140 nM, about 150 nM, about 160 nM, about 170 nM, about 180 nM, about 190 nM, about 200 nM, about 210 nM, about 220 nM, about 230 nM, about 240 nM, about 250 nM, about 260 nM, about 270 nM, about 280 nM, about 290 nM, or greater than about 300 nM, e.g., as determined by biolayer interferometry (e.g. Octet binding) and/or surface plasmon resonance (e.g. Biacore).

[0070] In an embodiment, the IL-2 agent selectively activates IL-2 signaling in T regulatory cells in vitro and/or in vivo, e.g., having an T helper EC₅₀/Treg EC₅₀ ratio greater than about 1, about 2, about 3, about 4, about 5, about 6, about 7, about 8, about 9, about 10, about 11, about 12, about 13, about 14, about 15, about 16, about 17, about 18, about 19, about 20, about 21, about 22, about 23, about 24, about 25, about 26, about 27, about 28, about 29, about 30, about 35, about 40, about 45, about 50, about 55, about 60, about 65, about 70, about 75, about 80, about 85, about 90, about 95, about 100, about 150, about 200, about 250, about 300, about 350, about 400, about 450, about 500, about 600, about 700, about 800, about 900, about 1000, about 1500, about 2000, about 2500, or about 3000, or more, or e.g., greater than 1 and about 1 to 2, about 2 to 3, about 3 to 4, about 4 to 5, greater than 1 and about 1 to 10, greater than 1 and about 1 to 20, greater than 1 and about 1 to 30, greater than 1 and about 1 to 40, greater than 1 and about 1 to 50, about 2 to 10, about 2 to 20, about 2 to 30, about 2 to 40, 2 to 50, about 5 to 10, about 5 to 20, about 5 to 30, about 5 to 40, about 5 to 50, about 10 to 20, about 10 to 30, about 10 to 40 about 10 to 50, about 20 to 40, about 20 to 50, about 50 to 100, about 100 to 200, about 200 to 500, about 500 to 1000, about 1000 to 2000, or about 1000 to 3000, relative to an IL-2 agent comprising a wild-type IL-2 or an IL-2 agent comprising a reference IL-2 variant e.g., as determined flow cytometry. In an embodiment, the T helper cell is a CD45+CD3+CD4+Foxp3− cell, e.g., determined by flow cytometry. In an embodiment, the Treg is CD45+CD3+CD4+Foxp3+ cell, e.g., determined by flow cytometry.

[0071] In an embodiment, the IL-2 agent selectively activates IL-2 signaling in T regulatory cells in vitro and/or in vivo, e.g., having an NK cell EC₅₀/Treg EC₅₀ ratio greater than about 1, about 2, about 3, about 4, about 5, about 6, about 7, about 8, about 9, about 10, about 11, about 12, about 13, about 14, about 15, about 16, about 17, about 18, about 19, about 20, about 21, about 22, about 23, about 24, about 25, about 26, about 27, about 28, about 29, about 30, about 35, about 40, about 45, about 50, about 55, about 60, about 65, about 70, about 75, about 80, about 85, about 90, about 95, about 100, about 150, about 200, about 250, about 300, about 350, about 400, about 450, about 500, about 600, about 700, about 800, about 900, about 1000, about 1500, about 2000, about 2500, or about 3000, or more, or e.g., greater than 1 and about 1 to 2, about 2 to 3, about 3 to 4, about 4 to 5, greater than 1 and about 1 to 10, greater than 1 and about 1 to 20, greater than 1 and about 1 to 30, greater than 1 and about 1 to 40, greater than 1 and about 1 to 50, about 2 to 10, about 2 to 20, about 2 to 30, about 2 to 40, 2 to 50, about 5 to 10, about 5 to 20, about 5 to 30, about 5 to 40, about 5 to 50, about 10 to 20, about 10 to 30, about 10 to 40 about 10 to 50, about 20 to 40, about 20 to 50, about 50 to 100, about 100 to 200, about 200 to 500, about 500 to 1000, about 1000 to 2000, or about 1000 to 3000, relative to an IL-2 agent comprising a wild-type IL-2 or an IL-2 agent comprising a reference IL-2 variant e.g., as determined flow cytometry. In an embodiment, the NK cell is a CD45+CD3-cell that is CD56+ and/or CD16+, e.g., determined by flow cytometry. In an embodiment, the NK cell is a CD45+CD3-CD56+ cell, e.g., determined by flow cytometry. In an embodiment, the Treg is CD45+CD3+CD4+Foxp3+ cell, e.g., determined by flow cytometry.

[0072] In an embodiment, the IL-2 agent has enhanced or increased potency and/or ability to induce or promote T regulatory cell activity, e.g., having an EC₅₀ for Tregs that is lower by about 1%, about 2%, about 3%, about 4%, about 5%, about 10%, about 15%, about 20%, about 25%, about 30%, about 35%, about 40%, about 45%, about 50%, about 55%, about 60%, about 65%, about 70%, about 75%, about 80%, about 85%, about 90%, about 95%, about 100% or more, or e.g., decreased by about 0.5-fold, about 1-fold, about 1.5-fold, about 2-fold, about 2.5-fold, about 3-fold, about 3.5-fold, about 4-fold, about 4.5-fold, about 5-fold, about 5.5-fold, about 6-fold, about 6.5-fold, about 7-fold, about 7.5-fold, about 8-fold, about 8.5-fold, about 9-fold, about 9.5-fold, about 10-fold or more e.g., relative to an IL-2 agent comprising a wild-type IL-2 or an IL-2 agent comprising a reference IL-2 variant e.g., as determined flow cytometry, a T regulatory cell proliferation or expansion assay in vitro or in vivo, and/or a T cell suppression assay.

[0073] In an embodiment, the IL-2 agent as reduced or decreased potency and/or ability to induce or promote T regulatory cell activity, e.g., having an EC50 for Tregs that is higher by about 1%, about 2%, about 3%, about 4%, about 5%, about 10%, about 15%, about 20%, about 25%, about 30%, about 35%, about 40%, about 45%, about 50%, about 55%, about 60%, about 65%, about 70%, about 75%, about 80%, about 85%, about 90%, about 95%, about 100% or more, or e.g., decreased by about 0.5-fold, about 1-fold, about 1.5-fold, about 2-fold, about 2.5-fold, about 3-fold, about 3.5-fold, about 4-fold, about 4.5-fold, about 5-fold, about 5.5-fold, about 6-fold, about 6.5-fold, about 7-fold, about 7.5-fold, about 8-fold, about 8.5-fold, about 9-fold, about 9.5-fold, about 10-fold, about 50-fold, about 100-fold, about 200-fold, about 500-fold, about 1000-fold, about 2000-fold, about 5000-fold, about 10,000-fold, about 15,000-fold, about 20,000-fold or more e.g., relative to an IL-2 agent comprising a wild-type IL-2 or an IL-2 agent comprising a reference IL-2 variant e.g., as determined flow cytometry, a T regulatory cell proliferation or expansion assay in vitro or in vivo, and/or a T cell suppression assay. In an embodiment, the IL-2 agent has reduced or decreased potency and/or ability to induce or promote T regulatory cell activity, e.g., having an EC50 for Tregs that is higher by about 100-fold or more, relative to an IL-2 agent comprising a wild-type IL-2 or an IL-2 agent comprising a reference IL-2 variant (e.g., as determined flow cytometry, a T regulatory cell proliferation or expansion assay in vitro or in vivo, and/or a T cell suppression assay), and does not activate, or does not significantly activate, NK cells.

[0074] In an embodiment, the IL-2 agent modulates (e.g., reduces (e.g., inhibits, blocks, or neutralizes) or increases (e.g., activates, initiates, or enhances) one or more biological activities of a T cell (e.g., Treg), in vitro, ex vivo, or in vivo.

[0075] In an embodiment, the IL-2 agent shows the same or similar binding affinity or specificity, or both, as an IL-2 agent described herein.

[0076] In an embodiment, the IL-2 agent shows the same or similar binding affinity or specificity, or both, as an IL-2 agent comprising one or more (e.g., 2, 3, 4, 5, 6, 7, 8, 9, 10, or more) alterations (e.g., substitutions) described herein.

[0077] In an embodiment, the IL-2 agent shows the same or similar binding affinity or specificity, or both, as an IL-2 agent comprising an amino acid sequence described herein.

[0078] In an embodiment, the IL-2 agent shows the same or similar binding affinity or specificity, or both, as an IL-2 agent comprising an amino acid sequence encoded by a nucleotide sequence described herein.

[0079] In an embodiment, the IL-2 agent inhibits, e.g., competitively inhibits, the binding of a second IL-2 agent to an IL-2 receptor, wherein the second IL-2 agent is an IL-2 agent described herein.

[0080] In an embodiment, the IL-2 agent competes for binding to an IL-2 receptor with a second IL-2 agent, wherein the second IL-2 agent is an IL-2 agent described herein.

[0081] In an embodiment, the IL-2 agent has one or more biological properties of an IL-2 agent described herein.

[0082] In an embodiment, the IL-2 agent has one or more structural properties of an IL-2 agent described herein.

[0083] In an embodiment, the IL-2 agent has one or more pharmacokinetic properties of an IL-2 agent described herein.

[0084] In an embodiment, the interleukin-2 (IL-2) agent comprises a human IL-2 variant comprising an amino acid alteration (e.g., substitution) at one or more (e.g., 1, 2, 3, 4, 5, 6, 7, 8, 9, 10, 11, 12, 13, 14, or all) position(s) chosen from: T3, H16, 128, K35, R38, F42, E68, V69, Q74, D84, S87, N88, 192, C125, Q126, or a combination thereof, e.g., corresponding to wild-type human IL-2. In another embodiment, the IL-2 agent comprises an amino acid alteration (e.g., substitution) at position V69, Q74, or a combination thereof. In an embodiment, the IL-2 agent comprises an amino acid alteration (e.g., substitution) at positions V69 and Q74. In an embodiment, the IL-2 agent comprises the amino acid substitution V69A. In an embodiment, the IL-2 agent comprises the amino acid substitution Q74P. In an embodiment, the IL-2 agent comprises an amino acid alteration (e.g., substitution) at position H16, 192, D84, or a combination thereof. In an embodiment, the IL-2 agent comprises an amino acid alteration (e.g., substitution) at position H16, optionally wherein the amino acid substitution is H16N, H16L, or H16D. In an embodiment, the IL-2 agent comprises the amino acid substitution H16N. In an embodiment, the IL-2 agent comprises the amino acid substitution H16L. In an embodiment, the IL-2 agent comprises an amino acid alteration (e.g., substitution) at position at 192, optionally wherein the amino acid substitution is I92S. In an embodiment, the IL-2 agent comprises an amino acid alteration (e.g., substitution) at position D84, optionally wherein the amino acid substitution is D84V. In an embodiment, the IL-2 agent comprises an amino acid alteration (e.g., substitution) at position K35, R38, F42, E68, or a combination thereof. In an embodiment, the IL-2 agent comprises an amino acid alteration (e.g., substitution) at position K35, optionally wherein the amino acid substitution is K35E. In an embodiment, the IL-2 agent comprises an amino acid alteration (e.g., substitution) at position R38, optionally wherein the amino acid substitution is R38E, R38N or R38Q. In an embodiment, the IL-2 agent comprises the amino acid substitution R38N. In an embodiment, the IL-2 agent comprises the amino acid substitution R38Q. In an embodiment, the IL-2 agent comprises an amino acid alteration (e.g., substitution) at position F42, optionally wherein the amino acid substitution is F42K or F42Q. In an embodiment, the IL-2 agent comprises the amino acid substitution F42Q.

[0085] In an embodiment, the IL-2 agent comprises one or more (e.g., two, three, four, or all) of (i)-(v):
[0086] (i) one or more (e.g., two, three, four, five, six, or seven) amino acid alterations (e.g., substitutions) that reduce, or are identified to reduce, its affinity for CD122 (e.g., CD122/CD132 heterodimer), e.g., an alteration (e.g., substitution) at position H16 (e.g., H16L, H16N, or H16D), 128 (e.g., I28T or I28F), D84 (e.g., D84V), S87 (e.g., S87R), N88 (e.g., N88S, N88L, or N88D), 192 (e.g., I92S), and/or Q126 (e.g., Q126T, Q126K, or Q126R);
[0087] (ii) one or more (e.g., two) amino acid alterations (e.g., substitutions) that increase, or are identified to increase, the stability of the IL-2 agent, e.g., an alteration (e.g., substitution) at position V69 (e.g., V69A) and/or Q74 (e.g., Q74P);
[0088] (iii) one or more (e.g., two, three, or four) amino acid alterations (e.g., substitutions) that reduce, or are identified to reduce, its affinity for CD25, e.g., an alteration (e.g., substitution) at position K35 (e.g., K35E), R38 (e.g., R38E, R38N, or R38Q), F42 (e.g., F42K or F42Q), and/or E68 (e.g., E68Q or E68N); or
[0089] (iv) one or more amino acid alterations (e.g., substitutions) that reduce, or are identified to reduce, O-glycosylation of the IL-2 agent, e.g., an alteration (e.g., substitution) at position T3 (e.g., T3A); or
[0090] (v) one or more amino acid alterations (e.g., substitutions) that reduce, or are identified to reduce, incorrect disulfide pairing and/or aggregation (e.g., to improve stability) of the IL-2 agent, e.g., an alteration (e.g., substitution) at position C125 (e.g., C125S).

[0091] In an embodiment, the IL-2 agent comprises (i). In an embodiment, the IL-2 agent comprises (ii). In an embodiment, the IL-2 agent comprises (iii). In an embodiment, the IL-2 agent comprises (iv). In an embodiment, the IL-2 agent comprises (v).

[0092] In an embodiment, the IL-2 agent comprises (i) and (ii). In an embodiment, the IL-2 agent comprises (i) and (iii). In an embodiment, the IL-2 agent comprises (i) and (iv). In an embodiment, the IL-2 agent comprises (i) and (v). In an embodiment, the IL-2 agent comprises (ii) and (iii). In an embodiment, the IL-2 agent comprises (ii) and (iv). In an embodiment, the IL-2 agent comprises (ii) and (v). In an embodiment, the IL-2 agent comprises (iii) and (iv). In an embodiment, the IL-2 agent comprises (iii) and (v). In an embodiment, the IL-2 agent comprises (iv) and (v).

[0093] In an embodiment, the IL-2 agent comprises (i), (ii), and (iii). In an embodiment, the IL-2 agent comprises (i), (ii), and (iv). In an embodiment, the IL-2 agent comprises (i), (ii), and (v). In an embodiment, the IL-2 agent comprises (i), (iii), and (iv). In an embodiment, the IL-2 agent comprises (i), (iii), and (v). In an embodiment, the IL-2 agent comprises (i), (iv), and (v). In an embodiment, the IL-2 agent comprises (ii), (iii), and (iv). In an embodiment, the IL-2 agent comprises (ii), (iii), and (v). In an embodiment, the IL-2 agent comprises (ii), (iv), and (iv). In an embodiment, the IL-2 agent comprises (iii), (iv), and (v).

[0094] In an embodiment, the IL-2 agent comprises (i), (ii), (iii), and (iv). In an embodiment, the IL-2 agent comprises (i), (ii), (iii), and (v). In an embodiment, the IL-2 agent comprises (i), (ii), (iv), and (v). In an embodiment, the IL-2 agent comprises (i), (iii), (iv), and (v). In an embodiment, the IL-2 agent comprises (ii), (iii), (iv), and (v).

[0095] In an embodiment, the IL-2 agent comprises (i), (ii), (iii), (iv), and (v).

[0096] In an embodiment, the IL-2 agent does not comprise (i). In an embodiment, the IL-2 agent does not comprise (ii). In an embodiment, the IL-2 agent does not comprise (iii). In an embodiment, the IL-2 agent does not comprise (iv). In an embodiment, the IL-2 agent does not comprise (v).

[0097] In an embodiment, the IL-2 agent does not comprise (i) and (ii). In an embodiment, the IL-2 agent does not comprise (i) and (iii). In an embodiment, the IL-2 agent does not comprise (i) and (iv). In an embodiment, the IL-2 agent does not comprise (i) and (v). In an embodiment, the IL-2 agent does not comprise (ii) and (iii). In an embodiment, the IL-2 agent does not comprise (ii) and (iv). In an embodiment, the IL-2 agent does not comprise (ii) and (v). In an embodiment, the IL-2 agent does not comprise (iii) and (iv). In an embodiment, the IL-2 agent does not comprise (iii) and (v). In an embodiment, the IL-2 agent does not comprise (iv) and (v).

[0098] In an embodiment, the IL-2 agent does not comprise (i), (ii), and (iii). In an embodiment, the IL-2 agent does not comprise (i), (ii), and (iv). In an embodiment, the IL-2 agent does not comprise (i), (ii), and (v). In an embodiment, the IL-2 agent does not comprise (i), (iii), and (iv). In an embodiment, the IL-2 agent does not comprise (i), (iii), and (v). In an embodiment, the IL-2 agent does not comprise (i), (iv), and (v). In an embodiment, the IL-2 agent does not comprise (ii), (iii), and (iv). In an embodiment, the IL-2 agent does not comprise (ii), (iii), and (v). In an embodiment, the IL-2 agent does not comprise (ii), (iv), and (iv). In an embodiment, the IL-2 agent does not comprise (iii), (iv), and (v).

[0099] In an embodiment, the IL-2 agent does not comprise (i), (ii), (iii), and (iv). In an embodiment, the IL-2 agent does not comprise (i), (ii), (iii), and (v). In an embodiment, the IL-2 agent does not comprise (i), (ii), (iv), and (v). In an embodiment, the IL-2 agent does not comprise (i), (iii), (iv), and (v). In an embodiment, the IL-2 agent does not comprise (ii), (iii), (iv), and (v).

[0100] In an embodiment, the IL-2 agent does not comprise (i), (ii), (iii), (iv), and (v).

[0101] In an embodiment, the IL-2 agent comprises an amino acid alteration (e.g., substitution):
[0102] (i) at position V69 and Q74, and/or at position K35; and
[0103] (ii) at position H16, 192, or D84; and optionally
[0104] (iii) at position R38, F42, E68, or a combination thereof.

[0105] In an embodiment, the IL-2 agent comprises an amino acid alteration (e.g., substitution):
[0106] (i) at position V69 and Q74, and/or at position K35; and
[0107] (ii) at position H16, 192, or D84; and
[0108] (iii) at position R38, F42, E68, or a combination thereof.

[0109] In an embodiment, the IL-2 agent comprises an amino acid alteration (e.g., substitution):
[0110] (i) at position V69 and Q74, and/or at position K35; and
[0111] (ii) at position H16, 192, or D84; or
[0112] (iii) at position R38, F42, E68, or a combination thereof.

[0113] In an embodiment, the IL-2 agent comprises an amino acid alteration (e.g., substitution):
[0114] (i) at position V69 and Q74; and/or at position K35; and
[0115] (ii) at position H16, 192, D84, or a combination thereof, and
[0116] (iii) at position R38, F42, E68, or a combination thereof.

[0117] In an embodiment, the IL-2 agent comprises an amino acid alteration (e.g., substitution) at position V69, Q74, and H16, optionally wherein the amino acid substitution is V69A, Q74P, and H16N or H16L, respectively, optionally wherein the amino acid substitutions are V69A, Q74P, and H16L. In an embodiment, the IL-2 agent comprises the amino acid substitutions V69A, Q74P, and H16L.

[0118] In an embodiment, the IL-2 agent comprises an amino acid alteration (e.g., substitution) at position V69, Q74, and 192, optionally wherein the amino acid substitution is V69A, Q74P, and I92S, respectively. In an embodiment, the IL-2 agent comprises the amino acid substitutions V69A, Q74P, and I92S.

[0119] In an embodiment, the IL-2 agent comprises an amino acid alteration (e.g., substitution) at position V69, Q74, and D84, optionally wherein the amino acid substitution is V69A, Q74P, and D84V, respectively. In an embodiment, the IL-2 agent comprises the amino acid substitutions V69A, Q74P, and D84V.

[0120] In an embodiment, the IL-2 agent comprises an amino acid alteration (e.g., substitution) at position V69, Q74, and R38, optionally wherein the amino acid substitution is V69A, Q74P, and R38Q, respectively.

[0121] In an embodiment, the IL-2 agent comprises an amino acid alteration (e.g., substitution) at position V69, Q74, and F42, optionally wherein the amino acid substitution is V69A, Q74P, and F42Q, respectively. In an embodiment, the IL-2 agent comprises the amino acid substitutions V69A, Q74P, and F42Q.

[0122] In an embodiment, the IL-2 agent comprises an amino acid alteration (e.g., substitution) at position V69, Q74, and R38, optionally wherein the amino acid substitution is V69A, Q74P, and R38N, respectively. In an embodiment, the IL-2 agent comprises the amino acid substitutions V69A, Q74P, and R38N.

[0123] In an embodiment, the IL-2 agent comprises an amino acid alteration (e.g., substitution) at position V69, Q74, and R38, optionally wherein the amino acid substitution is V69A, Q74P, and R38E, respectively. In an embodiment, the IL-2 agent comprises the amino acid substitutions V69A, Q74P, and R38E.

[0124] In an embodiment, the IL-2 agent comprises an amino acid alteration (e.g., substitution) at position V69, Q74, K35, and H16, optionally wherein the amino acid substitution is V69A, Q74P, K35E, and H16N or H16L, respectively. In an embodiment, the IL-2 agent comprises the amino acid substitutions V69A, Q74P, K35E, and H16N or H16L. In an embodiment, the IL-2 agent comprises the amino acid substitutions V69A, Q74P, K35E, and H16N. In an embodiment, the IL-2 agent comprises the amino acid substitution is V69A, Q74P, K35E, and H16L.

[0125] In an embodiment, the IL-2 agent comprises an amino acid alteration (e.g., substitution) at position V69, Q74, K35, H16, and R38, optionally wherein the amino acid substitution is V69A, Q74P, K35E, H16N, and R38N, respectively. In an embodiment, the IL-2 agent comprises the amino acid substitutions V69A, Q74P, K35E, H16N, and R38N.

[0126] In an embodiment, the IL-2 agent comprises an amino acid alteration (e.g., substitution) at position V69, Q74, H16, and R38, optionally wherein the amino acid substation is V69A, Q74P, H16N or H16L, and R38N or R38Q, respectively, optionally wherein the amino acid substitutions are V69A, Q74P, H16N or H16L, and R38Q. In an embodiment, the IL-2 agent comprises the amino acid substitutions V69A, Q74P, H16L, and R38Q.

[0127] In an embodiment, the IL-2 agent comprises an amino acid alteration (e.g., substitution) at position 128, E68, S87, N88, Q126, or a combination thereof. In an embodiment, the IL-2 agent comprises an amino acid alteration (e.g., substitution) at position 128, optionally wherein the amino acid substitution is I28T or I28F. In an embodiment, the IL-2 agent comprises the amino acid substitution I28T. In an embodiment, the IL-2 agent comprises the amino acid substitution I28F.

[0128] In an embodiment, the IL-2 agent comprises an amino acid alteration (e.g., substitution) at position E68, optionally wherein the amino acid substitution is E68Q or E68N. In an embodiment, the IL-2 agent comprises the amino acid substitution E68Q. In an embodiment, the IL-2 agent comprises the amino acid substitution E68N.

[0129] In an embodiment, the IL-2 agent comprises an amino acid alteration (e.g., substitution) at position S87, optionally wherein the amino acid substitution is S87R. In an embodiment, the IL-2 agent comprises the amino acid substitution S87R.

[0130] In an embodiment, the IL-2 agent comprises an amino acid alteration (e.g., substitution) at position N88, optionally wherein the amino acid substitution is N88R, N88S, N88L, or N88D. In an embodiment, the IL-2 agent comprises the amino acid substitution N88R. In an embodiment, the IL-2 agent comprises the amino acid substitution N88S. In an embodiment, the IL-2 agent comprises the amino acid substitution N88L. In an embodiment, the IL-2 agent comprises the amino acid substitution N88D.

[0131] In an embodiment, the IL-2 agent comprises an amino acid alteration (e.g., substitution) at position Q126, optionally wherein the amino acid substitution is Q126T, Q126K, or Q126R. In an embodiment, the IL-2 agent comprises the amino acid substitution Q126T. In an embodiment, the IL-2 agent comprises the amino acid substitution Q126K. In an embodiment, the IL-2 agent comprises the amino acid substitution Q126R.

[0132] In an embodiment, the IL-2 agent comprises an amino acid alteration (e.g., substitution) at position C125, optionally wherein the amino acid substitution is C125S. In an embodiment, the IL-2 agent comprises the amino acid substitution C125S.

[0133] In an embodiment, the IL-2 agent comprises an amino acid alteration (e.g., substitution) at position T3, optionally wherein the amino acid substitution is T3A. In an embodiment, the IL-2 agent comprises the amino acid substitution T3A.

[0134] In an embodiment, the IL-2 agent comprises an amino acid alteration (e.g., substitution) at position V69, Q74, and C125, optionally wherein the amino acid substitution is V69A, Q74P, and C125S, respectively. In an embodiment, the IL-2 agent comprises the amino acid substitutions V69A, Q74P, and C125S.

[0135] In an embodiment, the IL-2 agent comprises an amino acid alteration (e.g., substitution) at position T3, H16, 192, or a combination thereof, optionally wherein the amino acid substitution is T3A, H16N, and I92S, respectively.

[0136] In an embodiment, the IL-2 agent comprises an amino acid alteration (e.g., substitution) at position H16, V69, Q74, and C125, optionally wherein the amino acid substitution is H16N, V69A, Q74P, and C125S, respectively. In an embodiment, the IL-2 agent comprises the amino acid substitutions H16N, V69A, Q74P, and C125S.

[0137] In an embodiment, the IL-2 agent comprises an amino acid alteration (e.g., substitution) at position H16, V69, Q74, and C125, optionally wherein the amino acid substitution is H16L, V69A, Q74P, and C125S, respectively. In an embodiment, the IL-2 agent comprises the amino acid substitutions H16L, V69A, Q74P, and C125S. Various technical effects are associated with an IL-2 agent comprising the aforesaid combination of amino acid alterations. Without wishing to be bound by theory, it is believed that in an embodiment, an IL-2 agent comprising the amino acid substitutions H16L, V69A, Q74P, and C125S can have at least one or more of the following advantageous properties: (i) has reduced binding affinity for CD122 and/or CD132, which increases the potency and selectivity of the IL-2 agent for regulatory T cells (Treg) compared to other T cell types; (ii) is significantly stable, e.g., due to the presence of stabilizing V69A and Q74P mutations; (iii) has reduced or decreased (or has no more than a minimal effect on) binding capacity and/or binding affinity for CD25, which improves the lifetime of the IL-2 agent; (iv) does not substantially promote expansion, activation, survival, and/or proliferation of T effector cells and/or natural killer (NK) cells in vitro and/or in vivo; and/or (v) reduced incorrect disulfide pairing and improved stability, e.g., due to the presence of the C125S mutation. In an embodiment, an IL-2 agent comprising the H16L mutation has reduced binding affinity for CD122 and/or CD132 and/or increased potency and selectivity for Treg over other T cell types, compared to an IL-2 agent comprising other H16 mutations. These properties make an IL-2 agent comprising the amino acid substitutions H16L, V69A, Q74P, and C125S particularly suitable for treating disorders and conditions arising from abnormal immune responses, such as autoimmune diseases.

[0138] Thus, in an embodiment, an IL-2 agent comprising the amino acid substitutions H16L, V69A, Q74P, and C125S, has inter alia one or more (e.g., 2, 3, 4, 5, 6, 7, or all) of the following properties relative to a wild-type IL-2 or a reference IL-2 variant that does not comprise the amino acid substitutions: (i) enhanced or increased stability in vitro or in vivo; (ii) reduced or decreased binding capacity and/or binding affinity for human CD122 in vitro and/or in vivo; (iii) reduced or decreased binding capacity and/or binding affinity for human CD132 in vitro and/or in vivo; (iv) reduced or decreased affinity of the IL-2 variant for the heterodimeric IL-2 receptor composed of human CD122 and human CD132 (i.e. human CD122/CD132 heterodimer) in vitro and/or in vivo; (v) reduced or decreased (e.g., moderately reduced or decreased) binding capacity and/or binding affinity for human CD25 in vitro and/or in vivo; (vi) selective binding to regulatory T cells (e.g. Foxp3+ T cells); (vii) selective activation of the IL-2 signaling pathway in T regulatory cells (Tregs) in vitro or in vivo; or (viii) enhanced or increased ability to induce or promote Treg expansion, activity, survival and/or proliferation.

[0139] In an embodiment, the IL-2 agent comprises an amino acid alteration (e.g., substitution) at position H16, V69, Q74, 192, and C125, optionally wherein the amino acid substitution is H16L, V69A, Q74P, I92S, and C125S, respectively. In an embodiment, the IL-2 agent comprises the amino acid substitutions H16L, V69A, Q74P, I92S, and C125S.

[0140] In an embodiment, the IL-2 agent comprises an amino acid alteration (e.g., substitution) at position T3, V69, Q74, and C125, optionally wherein the amino acid substitution is T3A, V69A, Q74P, and C125S, respectively. In an embodiment, the IL-2 agent comprises the amino acid substitutions T3A, V69A, Q74P, and C125S.

[0141] In an embodiment, the IL-2 agent comprises an amino acid alteration (e.g., substitution) at position T3, H16, V69, Q74, and C125, optionally wherein the amino acid substitution is T3A, H16N or H16L, V69A, Q74P, and C125S, respectively. In an embodiment, the IL-2 agent comprises the amino acid substitutions T3A, H16N, V69A, Q74P, and C125S. In an embodiment, the IL-2 agent comprises the amino acid substitutions T3A, H16L, V69A, Q74P, and C125S.

[0142] In an embodiment, the IL-2 agent comprises an amino acid alteration (e.g., substitution) at position T3, V69, Q74, 192, and C125, optionally wherein the amino acid substitution is T3A, V69A, Q74P, I92S, and C125S, respectively. In an embodiment, the IL-2 agent comprises the amino acid substitutions T3A, V69A, Q74P, I92S, and C125S. In an embodiment, the IL-2 agent comprises the amino acid substitutions T3A, V69A, Q74P, I92S, and C125S.

[0143] In an embodiment, the IL-2 agent comprises a human IL-2 variant comprising an amino acid sequence chosen from: SEQ ID NO: 2, SEQ ID NO: 3, SEQ ID NO: 4, SEQ ID NO: 5, SEQ ID NO: 6, SEQ ID NO: 7, SEQ ID NO: 8, SEQ ID NO: 9, SEQ ID NO: 10, SEQ ID NO: 11, SEQ ID NO: 12, SEQ ID NO: 13, SEQ ID NO: 14, SEQ ID NO: 15, SEQ ID NO: 16, SEQ ID NO: 17, SEQ ID NO: 18, SEQ ID NO: 19, SEQ ID NO: 20, SEQ ID NO: 21, SEQ ID NO: 22, SEQ ID NO: 23, SEQ ID NO: 24, SEQ ID NO: 25, SEQ ID NO: 26, SEQ ID NO: 27, SEQ ID NO: 28, SEQ ID NO: 29, SEQ ID NO: 30, SEQ ID NO: 31, SEQ ID NO: 32, SEQ ID NO: 33, SEQ ID NO: 34, SEQ ID NO: 35, SEQ ID NO: 36, SEQ ID NO: 37, SEQ ID NO: 38, SEQ ID NO: 1000, SEQ ID NO: 1001, SEQ ID NO: 1002, or a functional fragment thereof, or an amino acid sequence with at least 80%, 85%, 90%, 91%, 92%, 93%, 94%, 95%, 96%, 97%, 98%, 99%, or more sequence identity thereof, or differing by no more than 1, 2, 3, 4, 5, 6, 7, 8, 9, 10, 11, 12, 13, 14, 15, 20, 25, or 30 amino acids thereto.

[0144] In an embodiment, the amino acid alteration(s) (e.g., substitution(s)) provides the IL-2 agent with at least one or more (e.g., 2, 3, 4, 5, 6, 7, 8, 9, 10, 11, or all) of the following properties relative to a reference IL-2 agent that does not comprise the amino acid alteration(s) (e.g., substitution(s)):
[0145] (i) enhanced or increased expression of the IL-2 agent;
[0146] (ii) inhibited or decreased aggregation of the IL-2 agent;
[0147] (iii) enhanced or increased stability of the IL-2 agent;
[0148] (iv) enhanced or increased half-life of the IL-2 agent;
[0149] (v) inhibited or decreased turnover and/or clearance of the IL-2 agent;
[0150] (vi) inhibited or decreased (e.g., moderately inhibited or decreased) or substantially unchanged binding of the IL-2 agent to human CD25;
[0151] (vii) inhibited or decreased affinity of the IL-2 agent for human CD122;
[0152] (viii) inhibited or decreased affinity of the IL-2 agent for human CD132; or
[0153] (ix) inhibited or decreased affinity of the IL-2 agent for the dimeric IL-2 receptor composed of human CD122 and human CD132;
[0154] (x) selective binding to regulatory T cells (e.g., Foxp3+ T cells);
[0155] (xi) selective activation of the IL-2 signaling pathway in Tregs; or
[0156] (xii) enhanced or increased, or reduced or decreased, ability to induce or promote Treg expansion, activity, survival and/or proliferation.

[0157] In an embodiment, the IL-2 agent comprises a human IL-2 variant comprising one or more amino acid alteration(s) (e.g., substitution(s)) chosen from H16D, H16N, H16L, I28T, K35E, R38Q, R38N, R38E, F42K, F42Q, V69A, Q74P, D84V, S87R, N88L, N88S, I92S, C125S; a polypeptide linker described herein; and a non-IL-2 moiety described herein; wherein the amino acid alteration(s) (e.g., substitution(s)) provide(s) the IL-2 agent with at least one or more of the following properties relative to a reference IL-2 agent that does not comprise the amino acid alteration(s) (e.g., substitution(s)):
[0158] (i) enhanced or increased expression of the IL-2 agent;
[0159] (ii) inhibited or decreased aggregation of the IL-2 agent;
[0160] (iii) enhanced or increased stability of the IL-2 agent;
[0161] (iv) enhanced or increased half-life of the IL-2 agent;
[0162] (v) inhibited or decreased turnover and/or clearance of the IL-2 agent;
[0163] (vi) inhibited or decreased (e.g., moderately inhibited or decreased) or substantially unchanged binding of the IL-2 agent to human CD25;
[0164] (vii) inhibited or decreased affinity of the IL-2 agent for human CD122;
[0165] (viii) inhibited or decreased affinity of the IL-2 agent for human CD132;
[0166] (ix) inhibited or decreased affinity of the IL-2 agent for the dimeric IL-2 receptor composed of human CD122 and human CD132;
[0167] (x) selective binding to regulatory T cells (e.g., Foxp3+ T cells);
[0168] (xi) selective activation of the IL-2 signaling pathway in Tregs; and/or
[0169] (xii) enhanced or increased, or reduced or decreased, ability to induce or promote Treg expansion, activity, survival, and/or proliferation.

[0170] In an embodiment, the human IL-2 variant comprises the amino acid alteration(s) (e.g., substitution(s)):
[0171] (i) C125S;
[0172] (ii) V69A, Q74P, and C125S;
[0173] (iii) H16D, V69A, Q74P, and C125S;
[0174] (iv) H16N, V69A, Q74P, and C125S;
[0175] (v) H16L, V69A, Q74P, and C125S;
[0176] (vi) I28T, V69A, Q74P, and C125S;
[0177] (vii) V69A, Q74P, D84V, and C125S;
[0178] (viii) V69A, Q74P, S87R, and C125S;
[0179] (ix) V69A, Q74P, N88L, and C125S;
[0180] (x) V69A, Q74P, N88S, and C125S;
[0181] (xi) V69A, Q74P, I92S, and C125S;
[0182] (xii) K35E, V69A, Q74P, and C125S;
[0183] (xiii) K35E, H16N, V69A, Q74P, and C125S;
[0184] (xiv) K35E, H16L, V69A, Q74P, and C125S;
[0185] (xv) K35E, D84V, V69A, Q74P, and C125S;
[0186] (xvi) K35E, I92S, V69A, Q74P, and C125S;
[0187] (xvii) R38Q, V69A, Q74P, and C125S;
[0188] (xviii) R38Q, H16N, V69A, Q74P, and C125S;
[0189] (xix) R38Q, H16L, V69A, Q74P, and C125S;
[0190] (xx) R38Q, D84V, V69A, Q74P, and C125S;
[0191] (xxi) R38Q, I92S, Q74P, and C125S;
[0192] (xxii) R38N, V69A, Q74P, and C125S;
[0193] (xxiii) R38N, H16N, V69A, Q74P, and C125S;
[0194] (xxiv) R38N, H16L, V69A, Q74P, and C125S;
[0195] (xxv) R38N, D84V, V69A, Q74P, and C125S;
[0196] (xxvi) R38N, I92S, Q74P, and C125S;
[0197] (xxvii) R38E, V69A, Q74P, and C125S;
[0198] (xxviii) F42K, V69A, Q74P, and C125S;
[0199] (xxix) F42Q, V69A, Q74P, and C125S;
[0200] (xxx) F42A, Y45A, L72G, N88D, V69A, Q74P, and C125S;
[0201] (xxxi) R38N, S87R, V69A, Q74P, and C125S;
[0202] (xxxii) R38E, H16N, V69A, Q74P, and C125S;
[0203] (xxxiii) R38E, D84V, V69A, Q74P, and C125S;
[0204] (xxxiv) R38E, S87R, V69A, Q74P, and C125S;
[0205] (xxxv) R38E, I92S, V69A, Q74P, and C125S;
[0206] (xxxvi) F42Q, H16N, V69A, Q74P, and C125S;
[0207] (xxxvii) F42Q, I92S, V69A, Q74P, and C125S; or
[0208] (xxxviii) K35E, R38N, H16N, V69A, Q74P, and C125S.
[0209] (xxxix) T3A, H16N, V69A, Q74P, and C125S;
[0210] (xl) T3A, H16L, V69A, Q74P, and C125S; or
[0211] (xli) T3A, V69A, Q74P, I92S, and C125S.

[0212] In an embodiment, the IL-2 agent comprises a human IL-2 variant comprising an amino acid sequence chosen from SEQ ID NO: 2, SEQ ID NO: 3, SEQ ID NO: 4, SEQ ID NO: 5, SEQ ID NO: 6, SEQ ID NO: 7, SEQ ID NO: 8, SEQ ID NO: 9, SEQ ID NO: 10, SEQ ID NO: 11, SEQ ID NO: 12, SEQ ID NO: 13, SEQ ID NO: 14, SEQ ID NO: 15, SEQ ID NO: 16, SEQ ID NO: 17, SEQ ID NO: 18, SEQ ID NO: 19, SEQ ID NO: 20, SEQ ID NO: 21, SEQ ID NO: 22, SEQ ID NO: 23, SEQ ID NO: 24, SEQ ID NO: 25, SEQ ID NO: 26, SEQ ID NO: 27, SEQ ID NO: 28, SEQ ID NO: 29, SEQ ID NO: 30, SEQ ID NO: 31, SEQ ID NO: 32, SEQ ID NO: 33, SEQ ID NO: 34, SEQ ID NO: 35, SEQ ID NO: 36, SEQ ID NO: 37, SEQ ID NO: 38, SEQ ID NO: 1000, SEQ ID NO: 1001, or SEQ ID NO: 1002, or a functional fragment thereof, or an amino acid sequence with at least 80%, 85%, 90%, 91%, 92%, 93%, 94%, 95%, 96%, 97%, 98%, 99%, or more sequence identity thereof, or differing by no more than 1, 2, 3, 4, 5, 6, 7, 8, 9, 10, 11, 12, 13, 14, 15, 20, 25, or 30 amino acids thereto; a polypeptide linker described herein; and a non-IL-2 moiety described herein; wherein the IL-2 agent exhibits at least one or more of the following properties relative to a reference IL-2 agent that does not comprise the human IL-2 polypeptide variant:
[0213] (i) enhanced or increased expression of the IL-2 agent;
[0214] (ii) inhibited or decreased aggregation of the IL-2 agent;
[0215] (iii) enhanced or increased stability of the IL-2 agent;
[0216] (iv) enhanced or increased half-life of the IL-2 agent;
[0217] (v) inhibited or decreased turnover and/or clearance of the IL-2 agent;
[0218] (vi) inhibited or decreased (e.g., moderately inhibited or decreased) or substantially unchanged binding of the IL-2 agent to human CD25;
[0219] (vii) inhibited or decreased affinity of the IL-2 agent for human CD122;
[0220] (viii) inhibited or decreased affinity of the IL-2 agent for human CD132;
[0221] (ix) inhibited or decreased affinity of the IL-2 agent for dimeric IL-2 receptor composed of human CD122 and human CD132;
[0222] (x) selective binding to regulatory T cells (e.g., Foxp3+ T cells);
[0223] (xi) selective activation of the IL-2 signaling pathway in Tregs; and/or
[0224] (xii) enhanced or increased, or reduced or decreased, ability to induce or promote Treg expansion, activity and/or proliferation.

[0225] Various technical effects are associated with an IL-2 agent comprising the amino acid sequence of SEQ ID NO: 5. Without wishing to be bound by theory, it is believed that in an embodiment, an IL-2 agent comprising the amino acid sequence of SEQ ID NO: 5 can have at least one or more of the following advantageous properties: (i) has reduced binding affinity for CD122 and/or CD132, which increases the potency and selectivity of the IL-2 agent for regulatory T cells (Treg) compared to other T cell types; (ii) is significantly stable, e.g., due to the presence of stabilizing V69A and Q74P mutations; (iii) has reduced or decreased (or has no more than a minimal effect on) binding capacity and/or binding affinity for CD25, which improves the lifetime of the IL-2 agent; (iv) does not substantially promote expansion, activation, survival, and/or proliferation of T effector cells and/or natural killer (NK) cells in vitro and/or in vivo; and/or (v) has reduced incorrect disulfide pairing and improved stability, e.g., due to the presence of the C125S mutation. In an embodiment, an IL-2 agent comprising the H16L mutation has reduced binding affinity for CD122 and/or CD132 and/or increased potency and selectivity for Treg over other T cell types, compared to an IL-2 agent comprising other H16 mutations. These properties make an IL-2 agent comprising the amino acid sequence of SEQ ID NO: 5 particularly suitable for treating disorders and conditions arising from abnormal immune responses, such as autoimmune diseases.

[0226] Thus, in an embodiment, an IL-2 agent comprising the amino acid sequence of SEQ ID NO: 5, has inter alia one or more (e.g., 2, 3, 4, 5, 6, 7, or all) of the following properties relative to a wild-type IL-2 or a reference IL-2 variant that does not comprise the amino acid substitutions: (i) enhanced or increased stability in vitro or in vivo; (ii) reduced or decreased binding capacity and/or binding affinity for human CD122 in vitro and/or in vivo; (iii) reduced or decreased binding capacity and/or binding affinity for human CD132 in vitro and/or in vivo; (iv) reduced or decreased affinity of the IL-2 variant for the heterodimeric IL-2 receptor composed of human CD122 and human CD132 (i.e. human CD122/CD132 heterodimer) in vitro and/or in vivo; (v) reduced or decreased (e.g., moderately reduced or decreased) binding capacity and/or binding affinity for human CD25 in vitro and/or in vivo; (vi) selective binding to regulatory T cells (e.g. Foxp3+ T cells); (vii) selective activation of the IL-2 signaling pathway in T regulatory cells (Tregs) in vitro or in vivo; or (viii) enhanced or increased ability to induce or promote Treg expansion, activity, survival and/or proliferation.

[0227] In an embodiment, the reference IL-2 agent comprises the amino acid sequence of SEQ ID NO: 1031, SEQ ID NO: 1, or SEQ ID NO: 2, or a functional fragment thereof. In an embodiment, the reference IL-2 agent comprises the amino acid sequence of SEQ ID NO: 1031. In an embodiment, the reference IL-2 agent comprises the amino acid sequence of SEQ ID NO: 1. In an embodiment, the reference IL-2 agent comprises the amino acid sequence of SEQ ID NO: 2.

[0228] In an embodiment, the IL-2 agent comprises a human IL-2 variant described herein fused to a non-IL-2 moiety described herein by a linker, wherein the linker is a polypeptide linker, optionally wherein the polypeptide linker is a flexible linker, a rigid linker, or a cleavable linker. In an embodiment, the polypeptide linker is a Gly-Ser linker (e.g., a (G4S)n linker, wherein n=1, 2, 3, 4, 5, 6 or more (SEQ ID NO: 1020)), a proline-rich extended linker (e.g., V1 GPc, V2, GPGc, V3 GcGcP, cellulase linker 4, cellulase linker 4), a rigid linker (e.g., A(EAAAK)nA, wherein n=2, 3, 4, 5, or more (SEQ ID NO: 1021); REPR_12), a non-GS linker (e.g., (GGGSA)n, wherein n=1, 2, 3, 4, 5, or more (SEQ ID NO: 1022)), or an immunoglobulin hinge region or portion thereof. In an embodiment, the polypeptide linker is a Gly-Ser linker comprising (G₄S)₁ (SEQ ID NO: 1023), (G₄S)₂ (SEQ ID NO: 1024), (G₄S)₃ (SEQ ID NO: 1025), (G₄S)₄ (SEQ ID NO: 48), (G₄S)₅ (SEQ ID NO: 1026), or (G₄S)₆ (SEQ ID NO: 1027). In an embodiment, the polypeptide linker is a Gly-Ser linker comprising (G₄S)₄ (SEQ ID NO: 48). In an embodiment, the polypeptide linker comprises an amino acid sequence chosen from SEQ ID NO: 48, SEQ ID NO: 49, SEQ ID NO: 50, SEQ ID NO: 51, SEQ ID NO: 52, SEQ ID NO: 53, SEQ ID NO: 54, or SEQ ID NO: 55. In an embodiment, the polypeptide linker comprises the amino acid sequence of SEQ ID NO: 48.

[0229] In an embodiment, the non-IL-2 moiety is an immunoglobulin Fc region, or a fragment or portion thereof (e.g., a functional fragment). In an embodiment, the immunoglobulin Fc region comprises an IgG Fc region, an IgD Fc region, an IgA Fc region, an IgM Fc region, or an IgE Fc region, or fragment or portion thereof. In an embodiment, the IgG Fc region comprises a wild type human IgG1 Fc region (e.g., IgG1 m3 allotype), a wild type IgG2 Fc region, or a wild type human IgG4 Fc region, or a fragment or portion thereof.

[0230] In an embodiment, the IgG Fc region comprises a mutant IgG1 or mutant IgG4 Fc region, or a fragment or portion thereof. In an embodiment, the IgG Fc region comprises one or more (e.g., two, three, four, or five) mutations, e.g., one or more (e.g., two, three, four, or five) mutations described herein.

[0231] In an embodiment, the IgG Fc region comprises a mutant IgG4 Fc region, or a fragment or portion thereof, wherein the mutant IgG4 Fc region is human.

[0232] In an embodiment, the mutant IgG4 Fc region, or fragment or portion thereof, comprises an amino acid alteration (e.g., substitution) at Ser228, numbering according to EU numbering, optionally wherein the amino acid alteration (e.g., substitution) at Ser228 is S228P. In an embodiment, the mutant IgG4 Fc region comprises the amino acid substitution S228P.

[0233] In an embodiment, the mutant IgG4 Fc region, or fragment or portion thereof, comprises an amino acid alteration (e.g., substitution) at Arg409, numbering according to EU numbering, optionally wherein the amino acid alteration (e.g., substitution) at Arg409 is R409K. In an embodiment, the mutant IgG4 Fc region comprises the amino acid substitution R409K.

[0234] In an embodiment, the mutant IgG4 Fc region, or a fragment or portion thereof, comprises amino acid alterations (e.g., substitutions) at Thr307, Gln311, and Ala378, numbering according to EU numbering, optionally wherein the amino acid alterations (e.g., substitutions) are T307Q, Q311V, and A378V, respectively. In an embodiment, the mutant IgG4 Fc region comprises the amino acid substitutions T307Q, Q311V, and A378V.

[0235] In an embodiment, the mutant IgG4 Fc region comprises an amino acid sequence chosen from SEQ ID NO: 44, SEQ ID NO: 45, SEQ ID NO: 46, or SEQ ID NO: 47, or an amino acid sequence with at least 80%, 85%, 90%, 91%, 92%, 93%, 94%, 95%, 96%, 97%, 98%, 99%, or more sequence identity thereof, or differing by no more than 1, 2, 3, 4, 5, 6, 7, 8, 9, 10, 11, 12, 13, 14, 15, 20, 25, or 30 amino acids thereto.

[0236] In an embodiment, the IgG Fc region comprises a mutant IgG1 Fc region, or a fragment or portion thereof, wherein the mutant IgG1 Fc region is human. In an embodiment, the mutant IgG1 Fc region (e.g., comprising an N297G substitution) has an IgG1 m3 allotype.

[0237] In an embodiment, the mutant IgG1 Fc region, or a fragment or portion thereof, comprises an amino acid alteration (e.g., substitution) at Asn297, numbering according to EU numbering, optionally wherein the amino acid alteration (e.g., substitution) at Asn297 is N297G. In an embodiment, the mutant IgG1 Fc region comprises the amino acid substitution N297G.

[0238] In an embodiment, the mutant IgG1 Fc region, or a fragment or portion thereof, comprises amino acid alterations (e.g., substitutions) at Leu234, Leu235, and Pro329, numbering according to EU numbering, optionally wherein the amino acid alterations (e.g., substitutions) are L234A, L235A, and P329G, respectively. In an embodiment, the mutant IgG1 Fc region comprises the amino acid substitutions L234A, L235A, and P329G.

[0239] In an embodiment, the mutant IgG1 Fc region, or a fragment or portion thereof, comprises amino acid alterations (e.g., substitutions) at Thr307, Gln311, and Ala378, numbering according to EU numbering, optionally wherein the amino acid alterations (e.g., substitutions) are T307Q, Q311V, and A378V, respectively. In an embodiment, the mutant IgG1 Fc region comprises the amino acid substitutions T307Q, Q311V, and A378V.

[0240] In an embodiment, the mutant IgG1 Fc region comprises an amino acid sequence chosen from SEQ ID NO: 40, SEQ ID NO: 41, SEQ ID NO: 42, SEQ ID NO: 43, or SEQ ID NO: 1003, or an amino acid sequence with at least 80%, 85%, 90%, 91%, 92%, 93%, 94%, 95%, 96%, 97%, 98%, 99%, or more sequence identity thereof, or differing by no more than 1, 2, 3, 4, 5, 6, 7, 8, 9, 10, 11, 12, 13, 14, 15, 20, 25, or 30 amino acids thereto. In an embodiment, the mutant IgG1 Fc region comprises an amino acid sequence of SEQ ID NO: 1003, or an amino acid sequence with at least 80%, 85%, 90%, 91%, 92%, 93%, 94%, 95%, 96%, 97%, 98%, 99%, or more sequence identity thereof, or differing by no more than 1, 2, 3, 4, 5, 6, 7, 8, 9, 10, 11, 12, 13, 14, 15, 20, 25, or 30 amino acids thereto. In an embodiment, the mutant IgG1 Fc region comprises an amino acid sequence of SEQ ID NO: 1003.

[0241] In an embodiment, the non-IL-2 moiety inhibits or decreases the ability of the IL-2 agent to elicit Fc-receptor-mediated immune effector functions.

[0242] In an embodiment, the IL-2 agent comprises an IL-2 variant comprising an amino acid sequence chosen from SEQ ID NO: 2, SEQ ID NO: 3, SEQ ID NO: 4, SEQ ID NO: 5, SEQ ID NO: 6, SEQ ID NO: 7, SEQ ID NO: 8, SEQ ID NO: 9, SEQ ID NO: 10, SEQ ID NO: 11, SEQ ID NO: 12, SEQ ID NO: 13, SEQ ID NO: 14, SEQ ID NO: 15, SEQ ID NO: 16, SEQ ID NO: 17, SEQ ID NO: 18, SEQ ID NO: 19, SEQ ID NO: 20, SEQ ID NO: 21, SEQ ID NO: 22, SEQ ID NO: 23, SEQ ID NO: 24, SEQ ID NO: 25, SEQ ID NO: 26, SEQ ID NO: 27, SEQ ID NO: 28, SEQ ID NO: 29, SEQ ID NO: 30, SEQ ID NO: 31, SEQ ID NO: 32, SEQ ID NO: 33, SEQ ID NO: 34, SEQ ID NO: 35, SEQ ID NO: 36, SEQ ID NO: 37, or SEQ ID NO: 38, SEQ ID NO: 1000, SEQ ID NO: 1001, or SEQ ID NO: 1002, or a functional fragment thereof; wherein the IL-2 agent comprises a Gly-Ser linker, optionally wherein the Gly-Ser linker comprises (G₄S)₄ (SEQ ID NO: 48), and wherein the IL-2 variant is fused by the Gly-Ser linker to an IgG Fc region comprising an amino acid sequence chosen from SEQ ID NO: 39, SEQ ID NO: 40, SEQ ID NO: 41, SEQ ID NO: 42, SEQ ID NO: 43, SEQ ID NO: 44, SEQ ID NO: 45, SEQ ID NO: 46, SEQ ID NO: 47, or SEQ ID NO: 1003.

[0243] In an embodiment, the IL-2 agent comprises an amino acid sequence chosen from SEQ ID NO: 56, SEQ ID NO: 57, SEQ ID NO: 58, SEQ ID NO: 59, SEQ ID NO: 60, SEQ ID NO: 61, SEQ ID NO: 62, SEQ ID NO: 63, SEQ ID NO: 64, SEQ ID NO: 65, SEQ ID NO: 66, SEQ ID NO: 67, SEQ ID NO: 68, SEQ ID NO: 69, SEQ ID NO: 70, SEQ ID NO: 71, SEQ ID NO: 72, SEQ ID NO: 73, SEQ ID NO: 74, SEQ ID NO: 75, SEQ ID NO: 76, SEQ ID NO: 77, SEQ ID NO: 78, SEQ ID NO: 79, SEQ ID NO: 80, SEQ ID NO: 81, SEQ ID NO: 82, SEQ ID NO: 83, SEQ ID NO: 84, SEQ ID NO: 85, SEQ ID NO: 86, SEQ ID NO: 87, SEQ ID NO: 88, SEQ ID NO: 89, SEQ ID NO: 90, SEQ ID NO: 91, SEQ ID NO: 92, SEQ ID NO: 93, SEQ ID NO: 1004, SEQ ID NO: 1005, SEQ ID NO: 1006, SEQ ID NO: 1007, SEQ ID NO: 1008, or SEQ ID NO: 1009, or a functional fragment thereof.

[0244] In an embodiment, the IL-2 agent comprises an amino acid sequence chosen from SEQ ID NO: 94, SEQ ID NO: 95, SEQ ID NO: 96, SEQ ID NO: 97, SEQ ID NO: 98, SEQ ID NO: 99, SEQ ID NO: 100, SEQ ID NO: 101, SEQ ID NO: 102, SEQ ID NO: 103, SEQ ID NO: 104, SEQ ID NO: 105, SEQ ID NO: 106, SEQ ID NO: 107, SEQ ID NO: 108, SEQ ID NO: 109, SEQ ID NO: 110, SEQ ID NO: 111, SEQ ID NO: 112, SEQ ID NO: 113, SEQ ID NO: 114, SEQ ID NO: 115, SEQ ID NO: 116, SEQ ID NO: 117, SEQ ID NO: 118, SEQ ID NO: 119, SEQ ID NO: 120, SEQ ID NO: 121, SEQ ID NO: 122, SEQ ID NO: 123, SEQ ID NO: 124, SEQ ID NO: 125, SEQ ID NO: 126, SEQ ID NO: 127, SEQ ID NO: 128, SEQ ID NO: 129, SEQ ID NO: 130, or SEQ ID NO: 131, or a functional fragment thereof.

[0245] In an embodiment, the IL-2 agent comprises an amino acid sequence chosen from SEQ ID NO: 132, SEQ ID NO: 133, SEQ ID NO: 134, SEQ ID NO: 135, SEQ ID NO: 136, SEQ ID NO: 137, SEQ ID NO: 138, SEQ ID NO: 139, SEQ ID NO: 140, SEQ ID NO: 141, SEQ ID NO: 142, SEQ ID NO: 143, SEQ ID NO: 144, SEQ ID NO: 145, SEQ ID NO: 146, SEQ ID NO: 147, SEQ ID NO: 148, SEQ ID NO: 149, SEQ ID NO: 150, SEQ ID NO: 151, SEQ ID NO: 152, SEQ ID NO: 153, SEQ ID NO: 154, SEQ ID NO: 155, SEQ ID NO: 156, SEQ ID NO: 157, SEQ ID NO: 158, SEQ ID NO: 159, SEQ ID NO: 160, SEQ ID NO: 161, SEQ ID NO: 162, SEQ ID NO: 163, SEQ ID NO: 164, SEQ ID NO: 165, SEQ ID NO: 166, SEQ ID NO: 167, SEQ ID NO: 168, or SEQ ID NO: 169, or a functional fragment thereof.

[0246] In an embodiment, the IL-2 agent comprises an amino acid sequence chosen from SEQ ID NO: 170, SEQ ID NO: 171, SEQ ID NO: 172, SEQ ID NO: 173, SEQ ID NO: 174, SEQ ID NO: 175, SEQ ID NO: 176, SEQ ID NO: 177, SEQ ID NO: 178, SEQ ID NO: 179, SEQ ID NO: 180, SEQ ID NO: 181, SEQ ID NO: 182, SEQ ID NO: 183, SEQ ID NO: 184, SEQ ID NO: 185, SEQ ID NO: 186, SEQ ID NO: 187, SEQ ID NO: 188, SEQ ID NO: 189, SEQ ID NO: 190, SEQ ID NO: 191, SEQ ID NO: 192, SEQ ID NO: 193, SEQ ID NO: 194, SEQ ID NO: 195, SEQ ID NO: 196, SEQ ID NO: 197, SEQ ID NO: 198, SEQ ID NO: 199, SEQ ID NO: 200, SEQ ID NO: 201, SEQ ID NO: 202, SEQ ID NO: 203, SEQ ID NO: 204, SEQ ID NO: 205, SEQ ID NO: 206, or SEQ ID NO: 207, or a functional fragment thereof.

[0247] In an embodiment, the IL-2 agent comprises an amino acid sequence chosen from SEQ ID NO: 208, SEQ ID NO: 209, SEQ ID NO: 210, SEQ ID NO: 211, SEQ ID NO: 212, SEQ ID NO: 213, SEQ ID NO: 214, SEQ ID NO: 215, SEQ ID NO: 216, SEQ ID NO: 217, SEQ ID NO: 218, SEQ ID NO: 219, SEQ ID NO: 220, SEQ ID NO: 221, SEQ ID NO: 222, SEQ ID NO: 223, SEQ ID NO: 224, SEQ ID NO: 225, SEQ ID NO: 226, SEQ ID NO: 227, SEQ ID NO: 228, SEQ ID NO: 229, SEQ ID NO: 230, SEQ ID NO: 231, SEQ ID NO: 232, SEQ ID NO: 233, SEQ ID NO: 234, SEQ ID NO: 235, SEQ ID NO: 236, SEQ ID NO: 237, SEQ ID NO: 238, SEQ ID NO: 239, SEQ ID NO: 240, SEQ ID NO: 241, SEQ ID NO: 242, SEQ ID NO: 243, SEQ ID NO: 244, or SEQ ID NO: 245, or a functional fragment thereof.

[0248] In an embodiment, the IL-2 agent comprises an amino acid sequence chosen from SEQ ID NO: 246, SEQ ID NO: 247, SEQ ID NO: 248, SEQ ID NO: 249, SEQ ID NO: 250, SEQ ID NO: 251, SEQ ID NO: 252, SEQ ID NO: 253, SEQ ID NO: 254, SEQ ID NO: 255, SEQ ID NO: 256, SEQ ID NO: 257, SEQ ID NO: 258, SEQ ID NO: 259, SEQ ID NO: 260, SEQ ID NO: 261, SEQ ID NO: 262, SEQ ID NO: 263, SEQ ID NO: 264, SEQ ID NO: 265, SEQ ID NO: 266, SEQ ID NO: 267, SEQ ID NO: 268, SEQ ID NO: 269, SEQ ID NO: 270, SEQ ID NO: 271, SEQ ID NO: 272, SEQ ID NO: 273, SEQ ID NO: 274, SEQ ID NO: 275, SEQ ID NO: 276, SEQ ID NO: 277, SEQ ID NO: 278, SEQ ID NO: 279, SEQ ID NO: 280, SEQ ID NO: 281, SEQ ID NO: 282, or SEQ ID NO: 283, or a functional fragment thereof.

[0249] In an embodiment, the IL-2 agent comprises an amino acid sequence chosen from SEQ ID NO: 284, SEQ ID NO: 285, SEQ ID NO: 286, SEQ ID NO: 287, SEQ ID NO: 288, SEQ ID NO: 289, SEQ ID NO: 290, SEQ ID NO: 291, SEQ ID NO: 292, SEQ ID NO: 293, SEQ ID NO: 294, SEQ ID NO: 295, SEQ ID NO: 296, SEQ ID NO: 297, SEQ ID NO: 298, SEQ ID NO: 299, SEQ ID NO: 300, SEQ ID NO: 301, SEQ ID NO: 302, SEQ ID NO: 303, SEQ ID NO: 304, SEQ ID NO: 305, SEQ ID NO: 306, SEQ ID NO: 307, SEQ ID NO: 308, SEQ ID NO: 309, SEQ ID NO: 310, SEQ ID NO: 311, SEQ ID NO: 312, SEQ ID NO: 313, SEQ ID NO: 314, SEQ ID NO: 315, SEQ ID NO: 316, SEQ ID NO: 317, SEQ ID NO: 318, SEQ ID NO: 319, SEQ ID NO: 320, or SEQ ID NO: 321, or a functional fragment thereof.

[0250] In an embodiment, the IL-2 agent comprises an amino acid sequence chosen from SEQ ID NO: 322, SEQ ID NO: 323, SEQ ID NO: 324, SEQ ID NO: 325, SEQ ID NO: 326, SEQ ID NO: 327, SEQ ID NO: 328, SEQ ID NO: 329, SEQ ID NO: 330, SEQ ID NO: 331, SEQ ID NO: 332, SEQ ID NO: 333, SEQ ID NO: 334, SEQ ID NO: 335, SEQ ID NO: 336, SEQ ID NO: 337, SEQ ID NO: 338, SEQ ID NO: 339, SEQ ID NO: 340, SEQ ID NO: 341, SEQ ID NO: 342, SEQ ID NO: 343, SEQ ID NO: 344, SEQ ID NO: 345, SEQ ID NO: 346, SEQ ID NO: 347, SEQ ID NO: 348, SEQ ID NO: 349, SEQ ID NO: 350, SEQ ID NO: 351, SEQ ID NO: 352, SEQ ID NO: 353, SEQ ID NO: 354, SEQ ID NO: 355, SEQ ID NO: 356, SEQ ID NO: 357, SEQ ID NO: 358, or SEQ ID NO: 359, or a functional fragment thereof.

[0251] In an embodiment, the IL-2 agent comprises the amino acid sequence of SEQ ID NO: 59, or a functional fragment thereof. In an embodiment, the IL-2 agent comprises the amino acid sequence of SEQ ID NO: 97, or a functional fragment thereof. In an embodiment, the IL-2 agent comprises the amino acid sequence of SEQ ID NO: 135, or a functional fragment thereof. In an embodiment, the IL-2 agent comprises the amino acid sequence of SEQ ID NO: 173, or a functional fragment thereof. In an embodiment, the IL-2 agent comprises the amino acid sequence of SEQ ID NO: 211, or a functional fragment thereof. In an embodiment, the IL-2 agent comprises the amino acid sequence of SEQ ID NO: 249, or a functional fragment thereof. In an embodiment, the IL-2 agent comprises the amino acid sequence of SEQ ID NO: 287, or a functional fragment thereof. In an embodiment, the IL-2 agent comprises the amino acid sequence of SEQ ID NO: 325, or a functional fragment thereof. In an embodiment, the IL-2 agent comprises the amino acid sequence of SEQ ID NO: 66, or a functional fragment thereof. In an embodiment, the IL-2 agent comprises the amino acid sequence of SEQ ID NO: 104, or a functional fragment thereof. In an embodiment, the IL-2 agent comprises the amino acid sequence of SEQ ID NO: 142, or a functional fragment thereof. In an embodiment, the IL-2 agent comprises the amino acid sequence of SEQ ID NO: 180, or a functional fragment thereof. In an embodiment, the IL-2 agent comprises the amino acid sequence of SEQ ID NO: 218, or a functional fragment thereof. In an embodiment, the IL-2 agent comprises the amino acid sequence of SEQ ID NO: 256, or a functional fragment thereof. In an embodiment, the IL-2 agent comprises the amino acid sequence of SEQ ID NO: 294, or a functional fragment thereof. In an embodiment, the IL-2 agent comprises the amino acid sequence of SEQ ID NO: 332, or a functional fragment thereof. In an embodiment, the IL-2 agent comprises the amino acid sequence of SEQ ID NO: 60, or a functional fragment thereof. In an embodiment, the IL-2 agent comprises the amino acid sequence of SEQ ID NO: 98, or a functional fragment thereof. In an embodiment, the IL-2 agent comprises the amino acid sequence of SEQ ID NO: 136, or a functional fragment thereof. In an embodiment, the IL-2 agent comprises the amino acid sequence of SEQ ID NO: 174, or a functional fragment thereof. In an embodiment, the IL-2 agent comprises the amino acid sequence of SEQ ID NO: 212, or a functional fragment thereof. In an embodiment, the IL-2 agent comprises the amino acid sequence of SEQ ID NO: 250, or a functional fragment thereof. In an embodiment, the IL-2 agent comprises the amino acid sequence of SEQ ID NO: 288, or a functional fragment thereof. In an embodiment, the IL-2 agent comprises the amino acid sequence of SEQ ID NO: 326, or a functional fragment thereof. In an embodiment, the IL-2 agent comprises the amino acid sequence of SEQ ID NO: 69, or a functional fragment thereof. In an embodiment, the IL-2 agent comprises the amino acid sequence of SEQ ID NO: 107, or a functional fragment thereof. In an embodiment, the IL-2 agent comprises the amino acid sequence of SEQ ID NO: 145, or a functional fragment thereof. In an embodiment, the IL-2 agent comprises the amino acid sequence of SEQ ID NO: 183, or a functional fragment thereof. In an embodiment, the IL-2 agent comprises the amino acid sequence of SEQ ID NO: 221, or a functional fragment thereof. In an embodiment, the IL-2 agent comprises the amino acid sequence of SEQ ID NO: 259, or a functional fragment thereof. In an embodiment, the IL-2 agent comprises the amino acid sequence of SEQ ID NO: 297, or a functional fragment thereof. In an embodiment, the IL-2 agent comprises the amino acid sequence of SEQ ID NO: 335, or a functional fragment thereof. In an embodiment, the IL-2 agent comprises the amino acid sequence of SEQ ID NO: 1004, or a functional fragment thereof. In an embodiment, the IL-2 agent comprises the amino acid sequence of SEQ ID NO: 1005, or a functional fragment thereof. In an embodiment, the IL-2 agent comprises the amino acid sequence of SEQ ID NO: 1006, or a functional fragment thereof. In an embodiment, the IL-2 agent comprises the amino acid sequence of SEQ ID NO: 1007, or a functional fragment thereof. In an embodiment, the IL-2 agent comprises the amino acid sequence of SEQ ID NO: 1008, or a functional fragment thereof. In an embodiment, the IL-2 agent comprises the amino acid sequence of SEQ ID NO: 1009, or a functional fragment thereof.

[0252] Various technical effects are associated with an IL-2 agent comprising the amino acid sequence of SEQ ID NO: 1008. Without wishing to be bound by theory, it is believed that in an embodiment, an IL-2 agent comprising the amino acid sequence of SEQ ID NO: 1008 can have at least one or more of the following advantageous properties: (i) has reduced binding affinity for CD122 and/or CD132, which increases the potency and selectivity of the IL-2 agent for regulatory T cells (Treg) compared to other T cell types; (ii) is significantly stable, e.g., due to the presence of stabilizing V69A and Q74P mutations; (iii) has reduced or decreased (or has no more than a minimal effect on) binding capacity and/or binding affinity for CD25, which improves the lifetime of the IL-2 agent; (iv) does not substantially promote expansion, activation, survival, and/or proliferation of T effector cells and/or natural killer (NK) cells in vitro and/or in vivo; and/or (v) has reduced incorrect disulfide pairing and improved stability, e.g., due to the presence of the C125S mutation. In an embodiment, an IL-2 agent comprising the H16L mutation has reduced binding affinity for CD122 and/or CD132 and/or increased potency and selectivity for Treg over other T cell types, compared to an IL-2 agent comprising other H16 mutations. These properties make an IL-2 variant an IL-2 agent comprising the amino acid sequence of SEQ ID NO: 1008 particularly suitable for treating disorders and conditions arising from abnormal immune responses, such as autoimmune diseases.

[0253] Thus, in an embodiment, an IL-2 agent comprising the amino acid sequence of SEQ ID NO: 1008, has inter alia one or more (e.g., 2, 3, 4, 5, 6, 7, or all) of the following properties relative to a wild-type IL-2 or a reference IL-2 variant that does not comprise the amino acid substitutions: (i) enhanced or increased stability in vitro or in vivo; (ii) reduced or decreased binding capacity and/or binding affinity for human CD122 in vitro and/or in vivo; (iii) reduced or decreased binding capacity and/or binding affinity for human CD132 in vitro and/or in vivo; (iv) reduced or decreased affinity of the IL-2 variant for the heterodimeric IL-2 receptor composed of human CD122 and human CD132 (i.e. human CD122/CD132 heterodimer) in vitro and/or in vivo; (v) reduced or decreased (e.g., moderately reduced or decreased) binding capacity and/or binding affinity for human CD25 in vitro and/or in vivo; (vi) selective binding to regulatory T cells (e.g. Foxp3+ T cells); (vii) selective activation of the IL-2 signaling pathway in T regulatory cells (Tregs) in vitro or in vivo; or (viii) enhanced or increased ability to induce or promote Treg expansion, activity, survival and/or proliferation.

[0254] In an embodiment, the IL-2 agent forms a dimer (e.g., a homodimer or heterodimer).

[0255] In an embodiment, the IL-2 agent comprises an IL-2 fusion protein. In an embodiment, the IL-2 agent comprises an IL-2 agent/anti-IL-2 antibody complex. In an embodiment, the IL-2 agent comprises a conjugate.

[0256] In some aspects, the disclosure provides a pharmaceutical composition comprising an IL-2 agent described, and a pharmaceutically acceptable carrier. In some aspects, the disclosure provides a nucleic acid encoding an IL-2 agent described herein. In some aspects, the disclosure provides a vector (e.g., expression vector) comprising a nucleic acid encoding an IL-2 agent described herein. In some aspects, the disclosure provides a cell (e.g., isolated cell) comprising a nucleic acid encoding an IL-2 agent described herein or a vector (e.g., expression vector) comprising a nucleic acid encoding an IL-2 agent described herein.

[0257] In some aspects, the disclosure provides a method of producing an IL-2 agent, comprising culturing (e.g., maintaining) a cell comprising a nucleic acid encoding an IL-2 agent described herein or a vector (e.g., expression vector) comprising a nucleic acid encoding an IL-2 agent described herein under conditions permitting expression of the IL-2 agent. In an embodiment, the method further comprising obtaining the IL-2 agent. In an embodiment, the method further comprising purifying the IL-2 agent.

[0258] In some aspects, the disclosure provides a method of enhancing regulatory T cell (Treg) expansion, activity, survival, and/or proliferation, comprising contacting a Treg cell or a population of Treg cells (e.g., in vitro, ex vivo, or in vivo) or administering to a subject in need thereof an effective amount of an IL-2 agent described herein, or a pharmaceutical composition comprising the IL-2 agent. The IL-2 agent may, for example, comprise the amino acid substitutions H16L, V69A, Q74P and C125S, or the amino acid substitutions H16N, V69A, Q74P and C125S. In an embodiment, the IL-2 agent comprises amino acid substitutions H16L, V69A, Q74P and C125S.

[0259] In some aspects, the disclosure provides a method of selectively activating the IL-2 signaling pathway in regulatory T cells (Tregs), comprising contacting a Treg cell or a population of Treg cells (e.g., in vitro, ex vivo, or in vivo) or administering to a subject in need thereof an effective amount of an IL-2 agent described herein, or a pharmaceutical composition of comprising the IL-2 agent. The IL-2 agent may, for example, comprise the amino acid substitutions H16L, V69A, Q74P and C125S, or the amino acid substitutions H16N, V69A, Q74P and C125S. In an embodiment, the IL-2 agent comprises amino acid substitutions H16L, V69A, Q74P and C125S.

[0260] In some aspects, the disclosure provides a method of inducing immune tolerance in a subject in need thereof, comprising administering an effective amount of an IL-2 agent described herein, or a pharmaceutical composition comprising the IL-2 agent. The IL-2 agent may, for example, comprise the amino acid substitutions H16L, V69A, Q74P and C125S, or the amino acid substitutions H16N, V69A, Q74P and C125S. In an embodiment, the IL-2 agent comprises amino acid substitutions H16L, V69A, Q74P and C125S.

[0261] In some aspects, the disclosure provides a method of treating a subject having a disorder (e.g., a disorder described herein, e.g., an autoimmune disease, lupus nephritis, autoimmune hepatitis, nephrotic syndrome, or a cancer) comprising administering to the subject an effective amount of an IL-2 agent described herein, or a pharmaceutical composition comprising the IL-2 agent. The IL-2 agent may, for example, comprise the amino acid substitutions H16L, V69A, Q74P and C125S, or the amino acid substitutions H16N, V69A, Q74P and C125S. In an embodiment, the IL-2 agent comprises amino acid substitutions H16L, V69A, Q74P and C125S.

[0262] In some aspects, the disclosure provides an IL-2 agent or a composition for use in a method for the treatment of a subject having a disorder (e.g., a disorder described herein, e.g., an autoimmune disease, lupus nephritis, autoimmune hepatitis, nephrotic syndrome, or a cancer), the method comprising administering an IL-2 agent described herein, or a pharmaceutical composition comprising the IL-2 agent, to said subject. The IL-2 agent may, for example, comprise the amino acid substitutions H16L, V69A, Q74P and C125S, or the amino acid substitutions H16N, V69A, Q74P and C125S. In an embodiment, the IL-2 agent comprises amino acid substitutions H16L, V69A, Q74P and C125S.

[0263] In some aspects, the disclosure provides use of an IL-2 agent or a composition in the manufacture of a medicament in a method for the treatment of a subject having a disorder (e.g., a disorder described herein, e.g., an autoimmune disease, lupus nephritis, autoimmune hepatitis, nephrotic syndrome, or a cancer), the method comprising administering an IL-2 agent described herein, or a pharmaceutical composition comprising the IL-2 agent, to said subject. The IL-2 agent may, for example, comprise the amino acid substitutions H16L, V69A, Q74P and C125S, or the amino acid substitutions H16N, V69A, Q74P and C125S. In an embodiment, the IL-2 agent comprises amino acid substitutions H16L, V69A, Q74P and C125S.

[0264] In some aspects, the disclosure provides a kit comprising an IL-2 agent described herein, or a pharmaceutical composition comprising the IL-2 agent, and instructions for use. The IL-2 agent may, for example, comprise the amino acid substitutions H16L, V69A, Q74P and C125S, or the amino acid substitutions H16N, V69A, Q74P and C125S. In an embodiment, the IL-2 agent comprises amino acid substitutions H16L, V69A, Q74P and C125S.

[0265] In some aspects, the disclosure provides a container comprising an IL-2 agent described herein, or a pharmaceutical composition comprising the IL-2 agent. The IL-2 agent may, for example, comprise the amino acid substitutions H16L, V69A, Q74P and C125S, or the amino acid substitutions H16N, V69A, Q74P and C125S. In an embodiment, the IL-2 agent comprises amino acid substitutions H16L, V69A, Q74P and C125S.

### BRIEF DESCRIPTION OF THE DRAWINGS

[0266] The patent or application file contains at least one drawing executed in color. Copies of this patent or patent application publication with color drawing(s) will be provided by the Office upon request and payment of the necessary fee.

[0267] FIG. 1A provides a schematic illustrating the domain structure of an exemplary, non-limiting embodiment of an IL-2 agent provided for herein. The IL-2 agent comprises an IL-2 moiety or variant (also referred to herein as a “mutein”), a peptide linker, an Fc containing hinge sequence, and CH2 and CH3 domains of an antibody, as indicated. FIG. 1B provides a depiction of an amino acid sequence of human IL-2 (SEQ ID NO: 1030) showing exemplary, non-limiting positions where, when mutated, results in an effect on IL-2 receptor binding and IL-2-mediated signaling activity in vitro and in vivo.

[0268] FIG. 2 provides a schematic illustrating a cell-based method to generate libraries of IL-2 variants using yeast surface display, and to select stable and active clones from those libraries. Mutations of IL-2 or an IL-2 variant expressed by an initial clone are generated by DNA synthesis or error-prone PCR and transformed into yeast cells. Yeast cells are stained with anti-Myc antibody and fluorescent secondary antibody to determine IL-2 expression (x-axis), and with recombinant CD25, anti-6xHis antibody (“6xHis” disclosed as SEQ ID NO: 1028) and fluorescent secondary antibody to measure bound CD25 (y-axis). In some versions of the experiment, an HA-tag is used in addition to or in place of the Myc-tag. Fluorescence-activated cell sorting is used to enrich IL-2 variants showing both high expression and high binding activity.

[0269] FIG. 3A provides a graph depicting the results of a method using IL-2 receptor titration to determine the affinity and binding capacity of IL-2 muteins displayed on the surface of yeast. Yeast clones expressing the indicated IL-2 muteins were incubated with a range of concentrations of CD25 extracellular domain tagged with 6xHis (“6xHis” disclosed as SEQ ID NO: 1028). Bound CD25 was measured by staining with anti-6xHis antibody (“6xHis” disclosed as SEQ ID NO: 1028) and fluorescent secondary antibody. Several exemplary IL-2 muteins are shown. Curve fitting was used to determine the binding affinity (K_{D}) and maximum binding signal (data not shown). FIG. 3B provides a graph depicting the relative binding capacity for selected IL-2 muteins (maximum binding signal normalized to IL-2 expression level).

[0270] FIG. 4A provides a graph illustrating thermal denaturation (melting curves) of selected IL-2 agents (IL-2-Fc fusion proteins) as determined by SYPRO Orange fluorescence. The native IL-2-Fc fusion showed maximum signal at low temperature, indicating presence of unfolding protein, while the V69A/Q74P mutein shows an unfolding event as temperature increases. FIG. 4B provides a HPLC size-exclusion chromatogram showing that most of the native IL-2-Fc fusion elutes very early from the column (>670 kDa), indicative of unfolded protein aggregation. In contrast, the V69A/Q74P IL-2-Fc elutes as a single peak at the expected time for an 84 kDa protein.

[0271] FIGS. 5A-5B provide scatterplots showing the results of a yeast cell sorting procedure used to identify mutations that affect the interaction with CD122 and/or CD132 IL-2 receptors. Yeast expressing a library of IL-2 variants on their surface were stained with CD122/CD132 Fc heterodimer at the indicated concentration, and bound receptors were detected using a fluorescent anti-human Fc secondary antibody. Surface IL-2 expression was detected with anti-Myc antibody and fluorescent secondary antibody. Cells within the indicate gates (boxes) were sorted and recovered, and the IL-2 muteins enriched in these populations determined by a combination of Sanger sequencing and next-generation sequencing.

[0272] FIG. 6A provides a graph showing the results of a method to determine fractional saturation of yeast expressing the indicated IL-2 mutein on their surface after titration with CD122/CD132 Fc heterodimer at the indicated concentrations. All muteins depicted contain V69A/Q74P in addition to the indicated mutation. Bound CD122/CD132 was labeled using an anti-human Fc fluorescent secondary and measured using an Accuri C6 flow cytometer. Fractional saturation was calculated by fitting each curve to a 4-parameter dose response to estimate maximum binding signal for each curve, then normalized so the estimated maximum is defined as 1. FIG. 6B provides a graph showing the results of the same method as FIG. 6A except that selected muteins are incubated with 6xHis-tagged (“6xHis” disclosed as SEQ ID NO: 1028) recombinant CD25 extracellular domain, and bound CD25 detected with anti-6xHis antibody (“6xHis” disclosed as SEQ ID NO: 1028).

[0273] FIG. 7 provides a series of graphs depicting the affinity of IL-2-Fc fusion proteins comprising different IL-2 variants, as indicated, for CD122/CD132 Fc heterodimer and extracellular domain of CD25 measured on an Octet biolayer interferometry instrument. IL-2 variants contain V69A/Q74P plus the indicated mutations. IL-2-Fc fusion proteins were immobilized on anti-human Fc capture tips and then incubated with a concentration range of indicate IL-2 receptor. Association and dissociation phase kinetics used to estimate binding affinity. Excess amount of an irrelevant antibody was used to prevent non-specific binding or capture of the CD122/CD132 Fc protein by the tips.

[0274] FIG. 8 provides a schematic illustrating a gating strategy and corresponding flow cytometry data to identify IL-2-sensitive cell populations from human PBMCs. Singlet lymphocytes as identified based on forward and side scatter. Populations are defined as: T regulatory cells (CD4+CD25^{high}Foxp3+), CD25^{high} T helper cells (CD4+CD25^{high}Foxp3−) and natural killer cells (CD3-CD56+).

[0275] FIGS. 9A-9D provide graphs depicting the IL-2 signaling response in IL-2-sensitive cells populations (FIG. 9A, Tregs; FIG. 9B, CD25+(high) T helper cells; FIG. 9C, NK cells; FIG. 9D CD8+ cytotoxic T cells) within human PBMCs after treatment with IL-2-Fc fusions containing mutations that reduce affinity for CD122/CD132 dimer, as determined by the extent of STAT5 phosphorylation. Cells were treated at indicated concentrations for 30 minutes with IL-2-Fc fusion protein containing V69A/Q74 mutations plus the indicated mutations, or with IL-2 N88D mutein fused to the C-terminus of a non-binding antibody (C-term N88D). Inactive IL-2-Fc fusion protein contains several mutations to reduce its IL-2 signaling activity (F42A, Y45A, L72G, N88D, V69A, Q74P). After treatment, cells were fixed with formaldehyde, permeabilized with cold methanol and stained for surface markers and for STAT5 transcription factor phosphorylated at Tyr694 (pSTAT5). Each population is identified based on gating as described in FIG. 8. Selected muteins were also evaluated for signaling activity on CD8+ cytotoxic T cells. These cells were gated as in FIG. 8, except using the CD8 surface marker in place of CD4. Median pSTAT5 level (median fluorescent intensity, MFI) is shown for each concentration of IL-2-Fc fusion protein tested in each cell population. Curve fitting performed using GraphPad Prism v5.03 with 4-parameter fit for log(agonist) vs response.

[0276] FIGS. 10A-10C provide graphs depicting the IL-2 signaling response in IL-2-sensitive cells populations (FIG. 10A, Tregs; FIG. 10B, CD25+(high) T helper cells; FIG. 10C, NK cells) within human PBMCs after treatment with IL-2-Fc fusions containing mutations that reduce affinity for CD25. Human PBMCs were treated and analyzed as in FIG. 9. Median pSTAT5 level (MFI) is shown for each treatment in each population. To highlight the effect on EC₅₀, signaling within each mutein was normalized from 0 to 1 across the concentration range of IL-2-Fc treatment.

[0277] FIGS. 11A-11C provide graphs depicting the IL-2 signaling response in IL-2-sensitive cells populations (FIG. 11A, Tregs; FIG. 11B, CD25+(high) T helper cells; FIG. 11C, NK cells) within human PBMCs after treatment with IL-2-Fc fusions containing paired mutations that reduce affinity for CD25 and CD122/CD132 dimer. Human PBMCs were treated and analyzed as in FIG. 9. IL-2-Fc fusion proteins comprising various IL-2 muteins are divided across top and bottom panels for clarity, as indicated. Median pSTAT5 level (MFI) is shown for each treatment in each population.

[0278] FIGS. 12A-12C provide graphs illustrating the expansion of Tregs in vivo, measured as a percentage of total CD3+ T cells, in Tg32 mice treated with IL-2-Fc H16N (FIG. 12A) or C-term N88D (FIG. 12B). Homozygous Tg32 mice were dosed by tail vein injection with the indicated amount of each IL-2 Fc fusion protein (dose levels are approximately equimolar). At the indicated time-point the lymphocyte populations were profiled, with Tregs defined as CD45+CD3+CD4+CD25^{high}CD127− cells. Data in FIG. 12A and FIG. 12B is average of three mice per treatment group. FIG. 12C shows data from individual mice at the highest dose of each IL-2-Fc fusion protein tested.

[0279] FIGS. 13A-13C provide graphs illustrating a change in the level of CD4+T helper cells, measured as a percentage of total CD3+ T cells, in Tg32 mice treated with IL-2-Fc H16N (FIG. 13A) or C-term N88D (FIG. 13B). Mice were dosed as in FIG. 12. CD4+T helper cells were defined as CD45+CD3+CD4+ cells not CD25^{high}CD127-. Data in FIG. 13A and FIG. 13B is average of three mice per treatment group. FIG. 13C shows data from individual mice at the highest dose of each IL-2-Fc fusion protein tested.

[0280] FIGS. 14A-14C provide graphs illustrating the change in the level of CD8+ cytotoxic T cells, measured as a percentage of total CD3+ T cells, in Tg32 mice treated with IL-2-Fc H16N (FIG. 14A) or C-term N88D (FIG. 14B). Mice were dosed as in FIG. 12. Cytotoxic T cells were defined as CD45+CD3+CD8+ cells. Data in FIG. 14A and FIG. 14B is average of three mice per treatment group. FIG. 14C shows data from individual mice at the highest dose of each IL-2-Fc fusion protein tested.

[0281] FIGS. 15A-15C provide graphs illustrating the change in the level of NK cells, measured as a percentage of total CD45+ lymphocytes, in Tg32 mice treated with IL-2-Fc H16N (FIG. 15A) or C-term N88D (FIG. 15B). Mice were dosed as in FIG. 12. NK cells were defined CD45+CD3-CD56+ cells. Data in FIG. 15A and FIG. 15B is average of three mice per treatment group. In each case the percentage NK cells is normalized within each mouse so that the pre-treatment value is 1. FIG. 15C shows data from individual mice at the highest dose of each IL-2-Fc fusion protein tested.

[0282] FIGS. 16A-16B provide graphs illustrating the binding kinetics of CD122/CD132 Fc heterodimer or CD25 extracellular domain at a range of concentrations to IL-2-Fc fusion proteins containing only V69A/Q74P mutations (wild-type; FIG. 16A) or inactivating mutations (42A, Y45A, L72G, N88D, V69A, Q74P; inactive; FIG. 16B) anchored to an anti-human Fc Octet tip. Binding kinetics were used to estimate the K_{D} of each interaction.

[0283] FIGS. 17A-17D provides graphs illustrating the clearance kinetics of IL-2 Fc fusion proteins in mice. Plasma was collected from mice treated as in FIG. 12 with various doses, as indicated, of IL-2-Fc fusion protein containing V69A/Q74P/H16N mutations or C-term N88D (FIGS. 17A-17B) or IL-2-Fc fusion protein containing inactivating mutations (42A, Y45A, L72G, N88D, V69A, Q74P; inactive; FIGS. 17C-17D). The amount of IL-2-Fc or C-term N88D present at each time-point was measured using an ELISA assay with anti-IL-2 capture antibody (R&D Systems, AF-202) and anti-human Fc secondary antibody conjugated to horseradish peroxidase (Jackson ImmunoResearch 109-035-008). 100% of starting material was defined as the amount detectable in blood plasma 1 hour after injection. Note that the x-axis is categorical, not scaled by time.

[0284] FIGS. 18A-18D depict expansion of immune cells in vivo following dosing with exemplary IL-2 Fc fusion proteins in humanized mice. FIG. 18A presents a schematic of the experimental design showing the various timepoints at which blood was drawn from the humanized mice dosed with the IL-2 Fc fusion polypeptides and control polypeptides. Flow cytometry was used to measure the various lymphocyte populations at each of the indicated timepoints. FIG. 18B presents the fold-expansion of T regulatory cells on the Y axis for each IL-2 Fc fusion polypeptide and its corresponding dose (low or high) depicted on the X axis. FIG. 18C presents the fold-expansion of T helper cells on the Y axis for each IL-2 Fc fusion polypeptide and its corresponding dose (low or high) depicted on the X axis. FIG. 18D presents the fold-expansion of NK cells on the Y axis for each IL-2 Fc fusion polypeptide and its corresponding dose (low or high) depicted on the X axis. The IL-2 Fc fusion polypeptides investigated, as depicted from left to right on the X axis of FIGS. 18B-18D, are as follows: the control monoclonal antibody (Motavizumab), inactive IL-2, the IL-2 mutein comprising the N88D mutation, wild type IL-2, IL-2 mutein comprising the mutations H16N/V69A/Q74P/C125S (SEQ ID NO: 1007), and IL-2 mutein comprising the mutations H16L/V69A/Q74P/C125S (SEQ ID NO:1008).

[0285] FIGS. 19A-19B depict the persistence and effective half-life of exemplary IL-2 fusion proteins in Tg32 mice. FIG. 19A presents the concentration of the IL-2 fusion proteins with the indicated combinations of mutations in the blood of mice on the Y axis over the days sampled post-dosing on the X axis. FIG. 19B presents a comparison of the half-life of an IL-2 fusion protein with the indicated combination of mutations in the IL-2 moiety with or without an additional mutation in the Fc region. The concentration of the indicated IL-2 fusion protein in the blood is presented on the Y axis over the days post-dosing on the X axis.

[0286] FIG. 20 depicts the pharmacokinetic profile of an exemplary IL-2-Fc fusion protein (comprising the mutations H16L/V69A/Q74P/C125S (SEQ ID NO:1008) (IL2-118 fused to IgG1 Fc N297G allotype m3)) in cynomolgus monkeys. Serum levels of the IL-2-Fc fusion protein were measured over time in four monkeys (numbered 3501, 3502, 3503, and 3504), following four weekly injections of 100 μg/kg of the IL-2-Fc fusion protein.

[0287] FIGS. 21A-21B depict the effects of an exemplary IL-2-Fc fusion protein (comprising the mutations H16L/V69A/Q74P/C125S (SEQ ID NO:1008) (IL2-118 fused to IgG1 Fc N297G allotype m3)) on expansion and proliferation of T regulatory cells in cynomolgus monkeys. FIG. 21A presents the expansion of T regulatory cells expressed as fold change to baseline (baseline=pre-dose) over time, following four weekly injections of 100 μg/kg of the IL-2-Fc fusion protein. FIG. 21B presents the percentage of Ki67⁺ T regulatory cells (measure of proliferating T regulatory cells) normalized to total T regulatory cells over time, following four weekly injections of 100 μg/kg of the IL-2-Fc fusion protein.

[0288] FIGS. 22A-22D depict the effects of an exemplary IL-2-Fc fusion protein (comprising the mutations H16L/V69A/Q74P/C125S (SEQ ID NO:1008) (IL2-118 fused to IgG1 Fc N297G allotype m3)) on circulating immune cells in cynomolgus monkeys following four weekly injections of 100 μg/kg of the IL-2-Fc fusion protein. FIG. 22A presents the effects of the IL-2-Fc fusion protein on the number of NK cells over time, FIG. 22B presents the effects on cytotoxic T cells over time, FIG. 22C presents the effects on T helper cells over time, and FIG. 22D presents the effects on total T cells over time. Data are shown as fold-change to baseline (baseline=pre-dose) for each cell type.

[0289] FIGS. 23A-23C depict the effects of an exemplary IL-2-Fc fusion protein described herein on disease progression in a murine model of systemic lupus erythematosus with kidney involvement similar to lupus nephritis. FIG. 23A presents the proteinuria score as measured weekly in mice following treatment with 40 μg/kg of the exemplary IL-2-Fc fusion protein or the PBS vehicle control, which were administered every 3 days starting at 3 weeks of age and continuing until 18 weeks of age. The proteinuria score is shown on the Y-axis and the age of the mice in weeks is shown on the X-axis. FIG. 23B presents a series of graphs depicting the proteinuria score on the Y-axis in individual mice treated with the vehicle control or exemplary IL-2-Fc fusion protein, as shown on the X-axis. From left to right, the first panel depicts the proteinuria scores at 11 weeks of age, the center panel depicts the scores at 12 weeks of age, and the final panel depicts the scores at 13 weeks of age. FIG. 23C presents the glomerular lesions quantified on the Y-axis, at the end of the study (when mice reached 18 weeks of age) in individual mice treated with the vehicle control or exemplary IL-2-Fc fusion protein, as shown on the X-axis.

[0290] FIGS. 24A-24C provide graphs depicting the IL-2 signaling response (p-STAT5 signaling) in IL-2-sensitive cell populations (FIG. 24A, Tregs; FIG. 25B, NK cells; FIG. 24C, cytotoxic T cells) within human PBMCs isolated from heathy subjects, subjects with lupus nephritis, or subjects with psoriasis after treatment with an exemplary IL-2 fusion protein (comprising the mutations H16L/V69A/Q74P/C125S (SEQ ID NO:1008) (IL2-118 fused to IgG1 Fc N297G allotype m3)).

### DETAILED DESCRIPTION

[0291] Disclosed herein are IL-2 agents (e.g., IL-2 variants, IL-2 fusion proteins, IL-2 complexes, or IL-2 conjugates) that have one or more structural and/or functional properties described herein. Advantageously, several of the IL-2 agents describe herein have one or more improved or desired properties, compared to an IL-2 agent comprising a wild-type IL-2. Without wishing to be bound by theory, it is believed that in an embodiment, the IL-2 agents described herein selectively enhance regulatory T cell (Treg) activity through the IL-2 pathway. Nucleic acid molecules encoding the IL-2 agents, expression vectors, host cells, compositions (e.g., pharmaceutical compositions), kits, containers, and methods for making the IL-2 agents, are also provided. The IL-2 agents and pharmaceutical compositions disclosed herein can be used (alone or in combination with other agents or therapeutic modalities) to treat, prevent, and/or diagnose disorders and conditions, e.g., disorders and conditions associated with T cell activity, e.g., a disorder or condition described herein (e.g., an autoimmune disorder described herein).

[0292] Immune response is typically controlled by recognition of specific foreign or self-antigens, communication between innate and adaptive immune pathways, crosstalk between B cells and T cells, and other factors. Some autoimmune diseases can be characterized by broad recognition of self-antigens. These diseases can be treated by therapies that broadly enhance the processes that protect self-antigens from attack by the immune system. Tregs are a type of T cell that recognizes self-antigens. In response to antigen stimulation they release immuno-suppressive cytokines and directly inhibit other T cells through cell-cell contacts. Impaired Treg activity contributes to a wide range of autoimmune disorders (e.g., too few cells, or cells that are less active). IL-2 is a cytokine that causes expansion and activation of many cell types, but Tregs are typically far more sensitive to IL-2 than are other cell types. Low dose IL-2 administration was shown to be associated with preferential, sustained Treg cell expansion in vivo and amelioration of the manifestations of chronic graft-vs-host disease (GVHD) in a substantial proportion of patients (Koreth et al., N Engl J Med. 2011; 365(22): 2055-2066). In an embodiment, the IL-2 agents described herein provide a long-lived immunomodulator (e.g., immunosuppressant) for a number of disorders (e.g., autoimmune indications).

[0293] The present disclosure is based, at least in part, on the discovery that IL-2 agents comprising a human IL-2 polypeptide with specific combinations of amino acid substitutions described herein can have advantageous technical effects, e.g., increasing the stability of the IL-2 agent and/or providing the selective activation of regulatory T cells. The IL-2 agents described herein typically requires CD25 for efficient signaling through IL-2 receptors, making it highly selective for Tregs. IL-2 signaling promotes Treg suppressor functions and drives proliferation. Without wishing to be bound by theory, it is believed that Tregs activated by the IL-2 agents described herein can dampen autoimmune activity through varied mechanisms.

[0294] In an embodiment, the IL-2 agents described herein were found to selectively bind to and activate regulatory T cells with a concomitant lack of effect on other immune cell types (e.g., CD25^{high} T cells and NK cells). Without wishing to be bound by theory, it is believed that in an embodiment, the amino acid substitutions described herein both promote the ability of the IL-2 agent to maintain an active conformation and modulate the binding affinity of the IL-2 agent for the dimeric receptor comprising IL-2Rβ (CD122) and IL-2Rγ (CD132), and the trimeric receptor comprising IL-2Rα (CD25) along with CD122 and CD132. In an embodiment, the IL-2 agents described herein have an affinity that is optimal for selectively binding to and activating IL-2 signaling in regulatory T cells, resulting in selective regulatory T cell activation and expansion both in vitro and in vivo. Without wishing to be bound by theory, it is believed that in an embodiment, binding of IL-2 to IL-2 receptors is a major route of clearance of IL-2 in vivo. For example, the IL-2 agents described herein, having a reduced affinity for dimeric and trimeric IL-2 receptors showed an extended half-life, indicating that lowering the affinity for IL-2 receptors decreases the clearance of the IL-2 agent in vivo. The IL-2 agents described herein, such as those having amino acid substitutions that increase stability and a reduce affinity for IL-2 receptors, can selectively activate regulatory T cells and exhibit an increased in half-life in vivo. The IL-2 agents described herein, such as those having mutations that prevent CD25 binding, can have improved half-life in vivo. In an embodiment, the IL-2 agent does not promote, or does not substantially promote, expansion, activation, survival, and/or proliferation of T effector cells and/or NK cells in vitro and/or in vivo. Without wishing to be bound by theory, it is believed that in an embodiment, the IL-2 agents described herein can have larger therapeutic window than low dose IL-2.

[0295] There are various technical effects associated with the presence of the particular sets of mutations described herein, for example, a set of mutations comprising an amino acid substitution at position H16, in combination with amino acid substitutions at positions V69, Q74, and C125 (e.g., H16L, V69A, Q74P, and C125S). Without wishing to be bound by theory, it is believed that in an embodiment, an IL-2 agent (e.g., IL-2 variant or IL-2 fusion protein) comprising H16L, V69A, Q74P, and C125S is significantly stable, e.g., due to the presence of stabilizing V69A and Q74P mutations. For example, it was unexpectedly discovered that the V69A and Q74P substitutions do not substantially increase (or essentially reduce) the binding affinity of the IL-2 agent for CD25, but rather stabilize the IL-2 agent in an active conformation sufficient for binding to CD25. Without wishing to be bound by theory, it is also believed that in an embodiment, an IL-2 agent comprising the aforesaid mutations has reduced binding affinity for CD122 and/or CD132, which increases the potency and selectivity of the IL-2 agent for regulatory T cells (Treg) compared to other T cell types. Therefore, an IL-2 agent comprising these mutations is typically stable and selectively activates regulatory T cells (Treg). Without wishing to be bound by theory, it is further believed that in an embodiment, an IL-2 agent comprising the aforesaid mutations has reduced or decreased binding capacity and/or binding affinity for CD25, which improves the lifetime of the IL-2 agent. Without wishing to be bound by theory, it is also believed that in an embodiment, an IL-2 agent comprising these mutations does not substantially promote expansion, activation, survival, and/or proliferation of T effector cells and/or natural killer (NK) cells in vitro and/or in vivo. In an embodiment, an IL-2 agent comprising the H16L mutation has reduced binding affinity for CD122 and/or CD132 and/or increased potency and selectivity for Treg over other T cell types, compared to an IL-2 agent comprising other H16 mutations. These properties make an IL-2 agent comprising the aforesaid mutations particularly suitable for treating disorders and conditions arising from abnormal immune responses, such as autoimmune diseases.

[0296] Thus, in an embodiment, an IL-2 agent (e.g., IL-2 variant or IL-2 fusion protein) comprising an amino acid substitution at position H16 in combination with amino acid substitutions at positions V69, Q74, and C125 (e.g., H16L, V69A, Q74P, and C125S), has inter alia one or more (e.g., 2, 3, 4, 5, 6, 7, or all) of the following properties relative to a wild-type IL-2 or a reference IL-2 agent that does not comprise the amino acid substitutions:

[0297] (i) enhanced or increased stability in vitro or in vivo;

[0298] (ii) reduced or decreased binding capacity and/or binding affinity for human CD122 in vitro and/or in vivo;

[0299] (iii) reduced or decreased binding capacity and/or binding affinity for human CD132 in vitro and/or in vivo;

[0300] (iv) reduced or decreased affinity of the IL-2 agent for the heterodimeric IL-2 receptor composed of human CD122 and human CD132 (i.e. human CD122/CD132 heterodimer) in vitro and/or in vivo;

[0301] (v) reduced or decreased (e.g., moderately reduced or decreased) binding capacity and/or binding affinity for human CD25 in vitro and/or in vivo;

[0302] (vi) selective binding to regulatory T cells (e.g. Foxp3+ T cells);

[0303] (vii) selective activation of the IL-2 signaling pathway in T regulatory cells (Tregs) in vitro or in vivo; or

[0304] (viii) enhanced or increased ability to induce or promote Treg expansion, activity, survival and/or proliferation.

### Definitions

[0305] As used herein, the articles “a” and “an” refer to one or to more than one (e.g., to at least one) of the grammatical object of the article.

[0306] The term “or” is used herein to mean, and is used interchangeably with, the term “and/or”, unless context clearly indicates otherwise.

[0307] “About” and “approximately” shall generally mean an acceptable degree of error for the quantity measured given the nature or precision of the measurements. Exemplary degrees of error are within 20 percent (%), typically, within 10%, and more typically, within 5% of a given value or range of values. When “about” or “approximately” is present before a series of numbers or a range, it is understood that “about” or “approximately” can modify each of the numbers in the series or range. Similarly, when “at least,” “more than,” “no more than,” “less than,” “no less than,” or “within” is present before a series of numbers or a range, it is understood that “at least,” “more than,” “no more than,” “less than,” “no less than,” or “within” can modify each of the numbers in the series or range. As used herein, ranges include both the upper and lower limit.

[0308] The compositions and methods disclosed herein encompass polypeptides and nucleic acids having the sequences specified, or sequences substantially identical or similar thereto, e.g., sequences at least 85%, 90%, 95% identical or higher to the sequence specified.

[0309] In the context of an amino acid sequence, the term “substantially identical” is used herein to refer to a first amino acid that contains a sufficient or minimum number of amino acid residues that are i) identical to, or ii) conservative substitutions of aligned amino acid residues in a second amino acid sequence such that the first and second amino acid sequences can have a common structural domain and/or common functional activity. For example, amino acid sequences that contain a common structural domain having at least about 85%, 90%, 91%, 92%, 93%, 94%, 95%, 96%, 97%, 98% or 99% identity to a reference sequence, e.g., a sequence provided herein.

[0310] In the context of nucleotide sequence, the term “substantially identical” is used herein to refer to a first nucleic acid sequence that contains a sufficient or minimum number of nucleotides that are identical to aligned nucleotides in a second nucleic acid sequence such that the first and second nucleotide sequences encode a polypeptide having common functional activity, or encode a common structural polypeptide domain or a common functional polypeptide activity. For example, nucleotide sequences having at least about 85%, 90%, 91%, 92%, 93%, 94%, 95%, 96%, 97%, 98% or 99% identity to a reference sequence, e.g., a sequence provided herein.

[0311] The term “functional variant” refers polypeptides that have a substantially identical amino acid sequence to the naturally-occurring sequence, or are encoded by a substantially identical nucleotide sequence, and are capable of having one or more activities of the naturally-occurring sequence.

[0312] Calculations of homology or sequence identity between sequences (the terms are used interchangeably herein) are performed as follows.

[0313] To determine the percent identity of two amino acid sequences, or of two nucleic acid sequences, the sequences are aligned for optimal comparison purposes (e.g., gaps can be introduced in one or both of a first and a second amino acid or nucleic acid sequence for optimal alignment and non-homologous sequences can be disregarded for comparison purposes). In a typical embodiment, the length of a reference sequence aligned for comparison purposes is at least 30%, e.g., at least 40%, 50%, 60%, e.g., at least 70%, 80%, 90%, 100% of the length of the reference sequence. The amino acid residues or nucleotides at corresponding amino acid positions or nucleotide positions are then compared. When a position in the first sequence is occupied by the same amino acid residue or nucleotide as the corresponding position in the second sequence, then the molecules are identical at that position.

[0314] The percent identity between the two sequences is a function of the number of identical positions shared by the sequences, taking into account the number of gaps, and the length of each gap, which need to be introduced for optimal alignment of the two sequences.

[0315] The comparison of sequences and determination of percent identity between two sequences can be accomplished using a mathematical algorithm. In an embodiment, the percent identity between two amino acid sequences is determined using the Needleman and Wunsch ((1970) J. Mol. Biol. 48:444-453) algorithm which has been incorporated into the GAP program in the GCG software package (available at www.gcg.com), using either a Blossum 62 matrix or a PAM250 matrix, and a gap weight of 16, 14, 12, 10, 8, 6, or 4 and a length weight of 1, 2, 3, 4, 5, or 6. In certain embodiments, the percent identity between two nucleotide sequences is determined using the GAP program in the GCG software package (available at www.gcg.com), using a NWSgapdna.CMP matrix and a gap weight of 40, 50, 60, 70, or 80 and a length weight of 1, 2, 3, 4, 5, or 6. One suitable set of parameters (and the one that should be used unless otherwise specified) are a Blossum 62 scoring matrix with a gap penalty of 12, a gap extend penalty of 4, and a frameshift gap penalty of 5.

[0316] The percent identity between two amino acid or nucleotide sequences can be determined using the algorithm of E. Meyers and W. Miller ((1989) CABIOS, 4:11-17) which has been incorporated into the ALIGN program (version 2.0), using a PAM120 weight residue table, a gap length penalty of 12 and a gap penalty of 4.

[0317] The nucleic acid and protein sequences described herein can be used as a “query sequence” to perform a search against public databases to, for example, identify other family members or related sequences. Such searches can be performed using the NBLAST and XBLAST programs (version 2.0) of Altschul, et al. (1990) J. Mol. Biol. 215:403-10. BLAST nucleotide searches can be performed with the NBLAST program, score=100, wordlength=12 to obtain nucleotide sequences homologous to a nucleic acid as described herein. BLAST protein searches can be performed with the XBLAST program, score=50, wordlength=3 to obtain amino acid sequences homologous to protein molecules described herein. To obtain gapped alignments for comparison purposes, Gapped BLAST can be utilized as described in Altschul et al., (1997) Nucleic Acids Res. 25:3389-3402. When utilizing BLAST and gapped BLAST programs, the default parameters of the respective programs (e.g., XBLAST and NBLAST) can be used. See www.ncbi.nlm.nih.gov.

[0318] As used herein, the term “hybridizes under low stringency, medium stringency, high stringency, or very high stringency conditions” describes conditions for hybridization and washing. Guidance for performing hybridization reactions can be found in Current Protocols in Molecular Biology, John Wiley & Sons, N.Y. (1989), 6.3.1-6.3.6, which is incorporated by reference. Aqueous and nonaqueous methods are described in that reference and either can be used. Specific hybridization conditions referred to herein are as follows: 1) low stringency hybridization conditions in 6× sodium chloride/sodium citrate (SSC) at about 45° C., followed by two washes in 0.2×SSC, 0.1% SDS at least at 50° C. (the temperature of the washes can be increased to 55° C. for low stringency conditions); 2) medium stringency hybridization conditions in 6×SSC at about 45° C., followed by one or more washes in 0.2×SSC, 0.1% SDS at 60° C.; 3) high stringency hybridization conditions in 6×SSC at about 45° C., followed by one or more washes in 0.2×SSC, 0.1% SDS at 65° C.; and preferably 4) very high stringency hybridization conditions are 0.5M sodium phosphate, 7% SDS at 65° C., followed by one or more washes at 0.2×SSC, 1% SDS at 65° C. Very high stringency conditions 4) are suitable conditions and the ones that should be used unless otherwise specified.

[0319] It is understood that the molecules described herein may have additional conservative or non-essential amino acid substitutions, which do not have a substantial effect on their functions.

[0320] The term “amino acid” is intended to embrace all molecules, whether natural or synthetic, which include both an amino functionality and an acid functionality and capable of being included in a polymer of naturally-occurring amino acids. Exemplary amino acids include naturally-occurring amino acids; analogs, derivatives and congeners thereof; amino acid analogs having variant side chains; and all stereoisomers of any of any of the foregoing. As used herein the term “amino acid” includes both the D- or L-optical isomers and peptidomimetics.

[0321] A “conservative amino acid substitution” is one in which the amino acid residue is replaced with an amino acid residue having a similar side chain Families of amino acid residues having similar side chains have been defined in the art. These families include amino acids with basic side chains (e.g., lysine, arginine, histidine), acidic side chains (e.g., aspartic acid, glutamic acid), uncharged polar side chains (e.g., glycine, asparagine, glutamine, serine, threonine, tyrosine, cysteine), nonpolar side chains (e.g., alanine, valine, leucine, isoleucine, proline, phenylalanine, methionine, tryptophan), beta-branched side chains (e.g., threonine, valine, isoleucine) and aromatic side chains (e.g., tyrosine, phenylalanine, tryptophan, histidine).

[0322] The terms “polypeptide,” “peptide” and “protein” (if single chain) are used interchangeably herein to refer to polymers of amino acids of any length. The polymer may be linear or branched, it may comprise modified amino acids, and it may be interrupted by non-amino acids. The terms also encompass an amino acid polymer that has been modified; for example, disulfide bond formation, glycosylation, lipidation, acetylation, phosphorylation, or any other manipulation, such as conjugation with a labeling component. The polypeptide can be isolated from natural sources, can be a produced by recombinant techniques from a eukaryotic or prokaryotic host, or can be a product of synthetic procedures.

[0323] As recognized by those skilled in the art, protein fragments, functional protein domains, and homologous proteins are also considered to be within the scope of this invention. For example, provided herein is any protein fragment of a reference protein (meaning a polypeptide sequence at least one amino acid residue shorter than a reference polypeptide sequence but otherwise identical) 5, 10, 15, 20, 25, 30, 35, 40, 45, 50, 55, 60, 70, 80, 90, 100, or greater than 100 amino acids in length. In another example, any protein that includes a stretch of about 20, about 30, about 40, about 50, or about 100 amino acids which are about 40%, about 50%, about 60%, about 70%, about 80%, about 90%, about 95%, about 98%, or about 100% identical to any of the sequences described herein can be utilized in accordance with the invention. In an embodiment, a protein sequence to be utilized in accordance with the disclosure includes 2, 3, 4, 5, 6, 7, 8, 9, 10, or more mutations as shown in any of the sequences provided or referenced herein.

[0324] The terms “nucleic acid,” “nucleic acid sequence,” “nucleotide sequence,” or “polynucleotide sequence,” and “polynucleotide” are used interchangeably. They refer to a polymeric form of nucleotides of any length, either deoxyribonucleotides or ribonucleotides, or analogs thereof. The polynucleotide may be either single-stranded or double-stranded, and if single-stranded may be the coding strand or non-coding (antisense) strand. A polynucleotide may comprise modified nucleotides, such as methylated nucleotides and nucleotide analogs. The sequence of nucleotides may be interrupted by non-nucleotide components. A polynucleotide may be further modified after polymerization, such as by conjugation with a labeling component. The nucleic acid may be a recombinant polynucleotide, or a polynucleotide of genomic, cDNA, semisynthetic, or synthetic origin which either does not occur in nature or is linked to another polynucleotide in a non-natural arrangement.

[0325] The term “isolated,” as used herein, refers to material that is removed from its original or native environment (e.g., the natural environment if it is naturally occurring). For example, a naturally-occurring polynucleotide or polypeptide present in a living animal is not isolated, but the same polynucleotide or polypeptide, separated by human intervention from some or all of the co-existing materials in the natural system, is isolated. Such polynucleotides could be part of a vector and/or such polynucleotides or polypeptides could be part of a composition, and still be isolated in that such vector or composition is not part of the environment in which it is found in nature.

[0326] As used herein, the term “treat,” a disorder, e.g., a myeloma, means that a subject (e.g., a human) who has a disorder, e.g., a myeloma, and/or experiences a symptom of a disorder, e.g., a myeloma, will, in an embodiment, suffer less a severe symptom and/or recover faster when an antibody molecule is administered than if the antibody molecule were never administered. In an embodiment, when a myeloma is treated, a bone marrow biopsy will show fewer clonal plasma cells, after effective treatment for myeloma. For example, a diagnostic assay will detect fewer clonal plasma cells in a biological sample of a subject after administration of an antibody molecule described herein for the effective treatment of a myeloma. Other assays, urine tests, or blood tests, can also be used to monitor treatment in a patient, or to detect the presence, e.g., decreased presence (or absence), of a symptom of a myeloma, after treatment of a myeloma in the subject. In an embodiment, when a myeloma is treated, the level of β2 microglobulin (β2M) in serum or urine will be decreased, after effective treatment for myeloma. Treatment can, e.g., partially or completely, alleviate, ameliorate, relieve, inhibit, or reduce the severity of, and/or reduce incidence, and optionally, delay onset of, one or more manifestations of the effects or symptoms, features, and/or causes of a disorder, e.g., a myeloma. In an embodiment, treatment is of a subject who does not exhibit certain signs of a disorder, e.g., a myeloma, and/or of a subject who exhibits only early signs of a disorder, e.g., nephropathy. In an embodiment, treatment is of a subject who exhibits one or more established signs of a disorder, e.g., a myeloma. In an embodiment, treatment is of a subject diagnosed as suffering from a disorder, e.g., a myeloma.

[0327] As used herein, the term “prevent,” a disorder, e.g., a myeloma, means that a subject (e.g., a human) is less likely to have the disorder, e.g., a myeloma, if the subject receives the antibody molecule.

[0328] Various aspects of the compositions and methods herein are described in further detail below. Additional definitions are set out throughout the specification.

### IL-2 Agents

[0329] The present disclosure provides IL-2 agents, including, but not limited to, IL-2 variants, IL-2 fusion proteins, IL-2 complexes, and IL-2 conjugates. For example, the IL-2 agents described herein can have one or more structural and/or functional properties described herein. In an embodiment, the IL-2 agent comprises an IL-2 variant comprising one or more amino acid alterations (e.g., substitutions) described herein. In an embodiment, the IL-2 agent comprises an IL-2 variant comprising one or more amino acid alterations (e.g., substitutions) described in Table 9. In an embodiment, the IL-2 agent comprises an IL-2 variant comprising an amino acid sequence described in Table 9, or a portion thereof. In an embodiment, the IL-2 agent, or a portion thereof, is encoded by a nucleic acid comprising a nucleotide sequence described herein, e.g., in Table 10. The one or more amino acid alterations (e.g., substitutions), alone or in combination, may confer one or more desired biological properties described herein. In an embodiment, the IL-2 agent can modulate (e.g. increase) Treg proliferation, survival, activation and/or function. In an embodiment, the modulation is selective or specific for the Tregs. For example, the IL-2 agent is capable of modulating the activity in Tregs but has limited or lacks the ability to promote the activity in non-regulatory T cells. In an embodiment, the IL-2 agent comprises a polypeptide (sometime referred to herein as “IL-2 polypeptide agent”).

### IL-2 Variants

[0330] In an embodiment, the IL-2 agent comprises an IL-2 variant, e.g., an IL-2 variant described herein.

[0331] In an embodiment, the IL-2 variant comprises an IL-2 polypeptide (e.g., a human IL-2 polypeptide) described herein, or a functional fragment thereof. In an embodiment, the IL-2 variant comprises one or more amino acid alterations (e.g., substitutions) described in Table 9. In an embodiment, the IL-2 variant comprises, or consists of, an amino acid sequence described in Table 9, or a functional fragment thereof. In an embodiment, the IL-2 variant is encoded by a nucleic acid comprising a nucleotide sequence described herein, e.g., in Table 10.

[0332] Without wishing to be bound by theory, it is believed that in an embodiment, the IL-2 variants described herein, which have reduced human CD25 and/or reduced human CD122/CD132 binding affinity relative to a wild-type human IL-2 or a reference IL-2 variant, can have improved potency and/or selectivity for binding to and activating regulatory T cells (Tregs) than wild type IL-2 or other IL-2 variants. The IL-2 variants described herein can be identified, e.g., by screening a library of mutated IL-2 polypeptides to identify IL-2 variants having a binding affinity for human CD25 and/or human CD122/CD132 in a desired range.

[0333] In an embodiment, the IL-2 variant has one or more (e.g., 2, 3, 4, 5, 6, 7, 8, 9, 10, 11, 12, or more) properties described herein, e.g., different and/or improved properties, relative to a wild-type IL-2 or a reference IL-2 variant. In an embodiment, the IL-2 variant comprises one or more (e.g., 2, 3, 4, 5, 6, 7, 8, 9, 10, or more) amino acid alterations (e.g., substitutions) that provide different and/or improved properties, relative to a wild-type IL-2 or a reference IL-2 variant. In an embodiment, the IL-2 variant has one or more (e.g., 2, 3, 4, 5, 6, 7, 8, 9, 10, 11, 12, or all) of the following different and/or improved properties (e.g., as determined by an assay described herein), relative to a wild-type IL-2 or a reference IL-2 variant:

[0334] i) altered (e.g., enhanced or increased) expression in vitro and/or in vivo;

[0335] ii) altered (e.g., reduced or decreased) aggregation in vitro and/or in vivo;

[0336] iii) altered (e.g., enhanced or increased) stability in vitro and/or in vivo;

[0337] iv) altered (e.g., enhanced or increased) half-life in vitro and/or in vivo;

[0338] v) altered (e.g., reduced or decreased) turnover and/or clearance in vivo;

[0339] vi) altered (e.g., reduced or decreased) susceptibility to proteolysis in vitro and/or in vivo;

[0340] vii) altered (e.g., enhanced or increased) resistance to proteolysis in vitro and/or in vivo;

[0341] viii) altered (e.g., reduced or decreased) binding capacity and/or binding affinity for human CD25 in vitro and/or in vivo;

[0342] ix) altered (e.g., reduced or decreased) binding capacity and/or binding affinity for human CD132 in vitro and/or in vivo;

[0343] x) altered (e.g., reduced or decreased) binding capacity and/or binding affinity for the dimeric IL-2 receptor comprising human CD122 and human CD132 in vitro and/or in vivo;

[0344] xi) altered (e.g., enhanced, increased, reduced, decreased, and/or selective) binding to Tregs in vitro and/or in vivo;

[0345] xii) altered (e.g., enhanced, increased, reduced, decreased, and/or selective) activation of the IL-2 signaling pathway in Tregs in vitro and/or in vivo;

[0346] xiii) altered (e.g., enhanced, increased, reduced, decreased, and/or selective) ability to induce or promote Treg expansion, activity, survival, and/or proliferation in vitro and/or in vivo.

[0347] In an embodiment, the IL-2 variant has altered (e.g., enhanced or increased) expression in vitro and/or in vivo, relative to a wild-type IL-2 or a reference IL-2 variant. In an embodiment, the IL-2 variant has enhanced or increased expression (e.g., in a bacterial or mammalian cell) relative to a wild-type IL-2. In an embodiment, the IL-2 variant has enhanced or increased expression (e.g., in bacterial or mammalian cell) relative to a reference IL-2 variant. In an embodiment, the expression of the IL-2 variant is increased by about 1%, 5%, 10%, 20%, 30%, 40%, 50%, 60%, 70%, 80%, 90%, 95%, or about 100%, or more. In an embodiment, the expression of the IL-2 variant is increased by about 0.5-fold, 1-fold, 2-fold, 3-fold, 4-fold, 5-fold, 6-fold, 7-fold, 8-fold, 9-fold, or about 10-fold, or more. In an embodiment, the IL-2 variant expresses at a higher or increased level in vitro and/or in vivo, e.g., increased by about 1%, about 2%, about 3%, about 4%, about 5%, about 10%, about 15%, about 20%, about 25%, about 30%, about 35%, about 40%, about 45%, about 50%, about 55%, about 60%, about 65%, about 70%, about 75%, about 80%, about 85%, about 90%, about 95%, about 100% or more e.g., relative to an IL-2 agent comprising a wild-type IL-2 or an IL-2 agent comprising a reference IL-2 variant e.g., as determined by an assay of protein concentration. In an embodiment, the IL-2 variant expresses at a higher or increased level, e.g., increased by about 0.5-fold, about 1-fold, about 1.5-fold, about 2-fold, about 2.5-fold, about 3-fold, about 3.5-fold, about 4-fold, about 4.5-fold, about 5-fold, about 5.5-fold, about 6-fold, about 6.5-fold, about 7-fold, about 7.5-fold, about 8-fold, about 8.5-fold, about 9-fold, about 9.5-fold, about 10-fold or more e.g., relative to an IL-2 agent comprising a wild-type IL-2 or an IL-2 agent comprising a reference IL-2 variant e.g., as determined by an assay of protein concentration.

[0348] In an embodiment, the IL-2 variant has altered (e.g., reduced or decreased) aggregation in vitro and/or in vivo, relative to a wild-type IL-2 or a reference IL-2 variant. In an embodiment, the IL-2 variant has reduced or decreased aggregation relative to a wild type IL-2. In an embodiment, the IL-2 variant has reduced or decreased aggregation relative to a reference IL-2 variant. In an embodiment, the aggregation of the IL-2 variant is decreased by about 1%, 5%, 10%, 20%, 30%, 40%, 50%, 60%, 70%, 80%, 90%, 95%, or about 100%, or more. In an embodiment, the aggregation of the IL-2 variant is decreased by about 0.5-fold, 1-fold, 2-fold, 3-fold, 4-fold, 5-fold, 6-fold, 7-fold, 8-fold, 9-fold, or about 10-fold, or more. In an embodiment, an IL-2 agent comprising an IL-2 variant described herein aggregates at lower or decreased level in vitro and/or in vivo, e.g., decreased by about 1%, about 2%, about 3%, about 4%, about 5%, about 10%, about 15%, about 20%, about 25%, about 30%, about 35%, about 40%, about 45%, about 50%, about 55%, about 60%, about 65%, about 70%, about 75%, about 80%, about 85%, about 90%, about 95%, about 100% or more e.g., relative to an IL-2 agent comprising a wild-type IL-2 or an IL-2 agent comprising a reference IL-2 variant e.g., as determined by melting temperature analysis (e.g., using fluorimetry), dynamic light scattering, and/or size-exclusion chromatography. In an embodiment, an IL-2 agent comprising an IL-2 variant described herein aggregates at lower or decreased level, e.g., decreased by about 0.5-fold, about 1-fold, about 1.5-fold, about 2-fold, about 2.5-fold, about 3-fold, about 3.5-fold, about 4-fold, about 4.5-fold, about 5-fold, about 5.5-fold, about 6-fold, about 6.5-fold, about 7-fold, about 7.5-fold, about 8-fold, about 8.5-fold, about 9-fold, about 9.5-fold, about 10-fold or more e.g., relative to an IL-2 agent comprising a wild-type IL-2 or an IL-2 agent comprising a reference IL-2 variant, e.g., as determined by melting temperature analysis (e.g., using fluorimetry), dynamic light scattering, and/or size-exclusion chromatography.

[0349] In an embodiment, the IL-2 variant has altered (e.g., enhanced or increased) stability in vitro and/or in vivo, relative to a wild-type IL-2 or a reference IL-2 variant. In an embodiment, the IL-2 variant has enhanced or increased stability relative to a wild-type IL-2. In an embodiment, the IL-2 variant has enhanced or increased stability relative to a reference IL-2 variant. In an embodiment, the stability of the IL-2 variant is increased by about 1%, 5%, 10%, 20%, 30%, 40%, 50%, 60%, 70%, 80%, 90%, 95%, or about 100%, or more. In an embodiment, the stability of the IL-2 variant is increased by about 0.5-fold, 1-fold, 2-fold, 3-fold, 4-fold, 5-fold, 6-fold, 7-fold, 8-fold, 9-fold, or about 10-fold, or more. In an embodiment, an IL-2 agent comprising an IL-variant described herein has enhanced or increased stability in vitro and/or in vivo, e.g., increased by about 1%, about 2%, about 3%, about 4%, about 5%, about 10%, about 15%, about 20%, about 25%, about 30%, about 35%, about 40%, about 45%, about 50%, about 55%, about 60%, about 65%, about 70%, about 75%, about 80%, about 85%, about 90%, about 95%, about 100% or more, or e.g., increased by about 0.5-fold, about 1-fold, about 1.5-fold, about 2-fold, about 2.5-fold, about 3-fold, about 3.5-fold, about 4-fold, about 4.5-fold, about 5-fold, about 5.5-fold, about 6-fold, about 6.5-fold, about 7-fold, about 7.5-fold, about 8-fold, about 8.5-fold, about 9-fold, about 9.5-fold, about 10-fold or more e.g., relative to an IL-2 agent comprising a wild-type IL-2 or an IL-2 agent comprising a reference IL-2 variant, e.g., as determined by yeast surface display, circular dichroism or related spectroscopic techniques, and/or melting temperature analysis (e.g., using fluorimetry).

[0350] In an embodiment, the IL-2 variant has altered (e.g., enhanced or increased) half-life in vitro and/or in vivo, relative to a wild-type IL-2 or a reference IL-2 variant. In an embodiment, the IL-2 variant has enhanced or increased half-life relative to a wild-type IL-2. In an embodiment, the IL-2 variant has enhanced or increased half-life relative to a reference IL-2 variant. In an embodiment, the half-life of the IL-2 variant is increased by about 1%, 5%, 10%, 20%, 30%, 40%, 50%, 60%, 70%, 80%, 90%, 95%, or about 100%, or more. In an embodiment, the half-life of the IL-2 variant is increased by about 0.5-fold, 1-fold, 2-fold, 3-fold, 4-fold, 5-fold, 6-fold, 7-fold, 8-fold, 9-fold, or about 10-fold, or more. In an embodiment, an IL-2 agent comprising an IL-2 variant described herein has enhanced or increased half-life in vitro and/or in vivo, e.g., increased by about 1%, about 2%, about 3%, about 4%, about 5%, about 10%, about 15%, about 20%, about 25%, about 30%, about 35%, about 40%, about 45%, about 50%, about 55%, about 60%, about 65%, about 70%, about 75%, about 80%, about 85%, about 90%, about 95%, about 100% or more, or e.g., greater than about 0.5-fold, about 1-fold, about 1.5-fold, about 2-fold, about 2.5-fold, about 3-fold, about 3.5-fold, about 4-fold, about 4.5-fold, about 5-fold, about 5.5-fold, about 6-fold, about 6.5-fold, about 7-fold, about 7.5-fold, about 8-fold, about 8.5-fold, about 9-fold, about 9.5-fold, about 10-fold or more e.g., relative to an IL-2 agent comprising a wild-type IL-2 or an IL-2 agent comprising a reference IL-2 variant, e.g., as determined by ELISA, flow cytometry, and/or mass spectrometry.

[0351] In an embodiment, the IL-2 variant has altered (e.g., reduced or decreased) turnover in vitro and/or in vivo, relative to a wild-type IL-2 or a reference IL-2 variant. In an embodiment, the IL-2 variant has reduced or decreased turnover relative to a wild-type IL-2. In an embodiment, the IL-2 variant has reduced or decreased turnover relative to a reference IL-2 variant. In an embodiment, the turnover of the IL-2 variant is decreased by about 1%, 5%, 10%, 20%, 30%, 40%, 50%, 60%, 70%, 80%, 90%, 95%, or about 100%, or more. In an embodiment, the turnover of the IL-2 variant is decreased by about 0.5-fold, 1-fold, 2-fold, 3-fold, 4-fold, 5-fold, 6-fold, 7-fold, 8-fold, 9-fold, about 10-fold, or more. In an embodiment, an IL-2 agent comprising an IL-2 variant described herein has a lower, reduced or decreased rate or level of turnover and/or clearance in vivo, e.g., decreased by about 1%, about 2%, about 3%, about 4%, about 5%, about 10%, about 15%, about 20%, about 25%, about 30%, about 35%, about 40%, about 45%, about 50%, about 55%, about 60%, about 65%, about 70%, about 75%, about 80%, about 85%, about 90%, about 95%, about 100% or more, or e.g., decreased by about 0.5-fold, about 1-fold, about 1.5-fold, about 2-fold, about 2.5-fold, about 3-fold, about 3.5-fold, about 4-fold, about 4.5-fold, about 5-fold, about 5.5-fold, about 6-fold, about 6.5-fold, about 7-fold, about 7.5-fold, about 8-fold, about 8.5-fold, about 9-fold, about 9.5-fold, about 10-fold or more e.g., relative to an IL-2 agent comprising a wild-type IL-2 or an IL-2 agent comprising a reference IL-2 variant, e.g., as determined by ELISA, flow cytometry, and/or mass spectrometry.

[0352] In an embodiment, the IL-2 has altered (e.g., reduced or decreased) susceptibility to proteolysis in vitro and/or in vivo, relative to a wild-type IL-2 or a reference IL-2 variant. In an embodiment, the IL-2 variant has reduced or decreased susceptibility to proteolysis relative to IL-2 (e.g., wild type human IL-2). In an embodiment, the IL-2 variant has reduced or decreased susceptibility to proteolysis relative to a reference IL-2 variant. In an embodiment, the susceptibility to proteolysis of the IL-2 variant is decreased by about 1%, 5%, 10%, 20%, 30%, 40%, 50%, 60%, 70%, 80%, 90%, 95%, or about 100%, or more. In an embodiment, the susceptibility to proteolysis of the IL-2 variant is decreased by about 0.5-fold, 1-fold, 2-fold, 3-fold, 4-fold, 5-fold, 6-fold, 7-fold, 8-fold, 9-fold, or about 10-fold, or more.

[0353] In an embodiment, the IL-2 variant has altered (e.g., enhanced or increased) resistance to proteolysis in vitro and/or in vivo, relative to a wild-type IL-2 or a reference IL-2 variant. In an embodiment, the IL-2 variant has enhanced or increased resistance to proteolysis relative to a wild-type IL-2. In an embodiment, the IL-2 variant has enhanced or increased resistance to proteolysis relative to a reference IL-2 variant. In an embodiment, the resistance to proteolysis of the IL-2 variant is increased by about 1%, 5%, 10%, 20%, 30%, 40%, 50%, 60%, 70%, 80%, 90%, 95%, or about 100%, or more. In an embodiment, the resistance to proteolysis of the IL-2 variant is increased by about 0.5-fold, 1-fold, 2-fold, 3-fold, 4-fold, 5-fold, 6-fold, 7-fold, 8-fold, 9-fold, or about 10-fold, or more.

[0354] In an embodiment, the IL-2 variant has altered (e.g., reduced or decreased) binding capacity and/or binding affinity for human CD25 in vitro and/or in vivo, relative to a wild-type IL-2 or a reference IL-2 variant. In an embodiment, the IL-2 variant has reduced or decreased binding capacity and/or binding affinity for human CD25 relative to a wild-type human IL-2). In an embodiment, the IL-2 variant has reduced or decreased binding capacity and/or binding affinity for human CD25 relative to a reference IL-2 variant. In an embodiment, the binding capacity and/or binding affinity of the IL-2 variant for human CD25 is decreased by about 1%, 5%, 10%, 20%, 30%, 40%, 50%, 60%, 70%, 80%, 90%, 95%, or about 100%, or more. In an embodiment, the binding capacity and/or binding affinity of the IL-2 variant for human CD25 is decreased by about 0.5-fold, 1-fold, 2-fold, 3-fold, 4-fold, 5-fold, 6-fold, 7-fold, 8-fold, 9-fold, or about 10-fold, or more. In an embodiment, an IL-2 agent comprising an IL-2 variant described herein has reduced or decreased binding affinity for CD25 (e.g., human CD25), e.g., decreased by about 1%, about 2%, about 3%, about 4%, about 5%, about 10%, about 15%, about 20%, about 25%, about 30%, about 35%, about 40%, about 45%, about 50%, about 55%, about 60%, about 65%, about 70%, about 75%, about 80%, about 85%, about 90%, about 95%, about 100% or more, or e.g., decreased by about 0.5-fold, about 1-fold, about 1.5-fold, about 2-fold, about 2.5-fold, about 3-fold, about 3.5-fold, about 4-fold, about 4.5-fold, about 5-fold, about 5.5-fold, about 6-fold, about 6.5-fold, about 7-fold, about 7.5-fold, about 8-fold, about 8.5-fold, about 9-fold, about 9.5-fold, about 10-fold or more e.g., relative to an IL-2 agent comprising a wild-type IL-2 or an IL-2 agent comprising a reference IL-2 variant e.g., as determined by yeast surface display, surface plasmon resonance (e.g. Biacore) and/or bio-layer interferometry (e.g. Octet binding).

[0355] In an embodiment, the IL-2 variant binds to CD25 (e.g., human CD25) with low affinity, e.g., with a dissociation constant (K_{D}) of about 5-500 pM, e.g., about 5, about 10, about 15, about 20, about 25, about 30, about 35, about 40, about 45, about 50, about 55, about 60, about 65, about 70, about 75, about 80, about 85, about 90, about 95, about 100, about 105, about 110, about 115, about 120, about 125, about 130, about 135, about 140, about 145, about 150, about 200, about 250, about 300, about 350, about 400, about 450, or about 500 pM, or e.g., about 10 to about 400 pM, about 20 to about 300 pM, about 50 to about 200 pM, about 100 to about 150 pM, about 5 to about 10 pM, e.g., about 10 to about 20 pM, about 20 to about 30 pM, or about 30 to about 40 pM, e.g., about 40 to about 50 pM, about 50 to about 60 pM, about 60 to about 70 pM, about 70 to about 80 pM, about 80 to about 90 pM, about 90 to about 100 pM, about 100 to about 110 pM, about 110 to about 120 pM, about 120 to about 130 pM, about 130 to about 140 pM about 140 to about 150 pM, about 150 to about 200 pM, about 200 to about 250 pM, about 250 to about 300 pM, about 300 to about 350 pM, about 350 to about 400 pM, about 400 to about 500 pM, or e.g., greater than about 5, about 10, about 15, about 20, about 25, about 30, about 35, about 40, about 45, about 50, about 55, about 60, about 65, about 70, about 75, about 80, about 85, about 90, about 95, about 100, about 105, about 110, about 115, about 120, about 125, about 130, about 135, about 140, about 145, about 150, about 200, about 250, about 300, about 350, about 400, about 450, or about 500 pM, e.g. as determined by yeast surface display, surface plasmon resonance (e.g. Biacore) and/or biolayer interferometry (e.g. Octet binding).

[0356] In an embodiment, the IL-2 variant binds to CD25 (e.g., human CD25) with low affinity, e.g., with a dissociation constant (KO of about 0.1-10 nM, e.g., about 0.1, about 0.2, about 0.3, about 0.4, about 0.5, about 0.6, about 0.7, about 0.8, about 0.9, about 1, about 1.5, about 2, about 2.5, about 3, about 3.5, about 4, about 4.5, about 5, about 6, about 7, about 8, about 9, or about 10 nM, or e.g., about 0.2 to about 5 nM, about 0.5 to about 2 nM, about 1 to 1.5 nM, about 0.1 to about 0.2 nM, e.g., about 0.2 to about 0.3 nM, about 0.3 to about 0.4 nM, or about 0.4 to about 0.5 nM, e.g., about 0.5 to about 0.6 nM, about 0.6 to about 0.7 nM, about 0.7 to about 0.8 nM, about 0.8 to about 0.9 nM, about 0.9 to about 1 nM, about 1 to about 1.5 nM, about 1.5 to about 2 nM, about 2.5 to about 3 nM, about 3.5 to about 4 nM, about 4 to about 4.5 nM, about 4.5 to about 5 nM, about 5 to about 6 nM, about 6 to about 7 nM, about 7 to about 8 nM, about 8 to about 9 nM, or about 9 to about 10 nM, or e.g., greater than about 0.1, about 0.2. about 0.3, about 0.4, about 0.5, about 0.6, about 0.7, about 0.8, about 0.9, about 1, about 2, about 3, about 4, about 5, about 6, about 7, about 8, about 9, or about 10 nM, e.g., as determined by surface plasmon resonance (e.g. Biacore) and/or bio-layer interferometry (e.g., Octet binding).

[0357] In an embodiment, the IL-2 variant has altered (e.g., reduced or decreased) binding capacity and/or binding affinity for human CD132 in vitro and/or in vivo, relative to a wild-type IL-2 or a reference IL-2 variant. In an embodiment, the IL-2 variant has reduced or decreased binding capacity and/or binding affinity for human CD132 relative to a wild-type IL-2. In an embodiment, the IL-2 variant has reduced or decreased binding capacity and/or binding affinity for human CD132 relative to a reference IL-2 variant. In an embodiment, the binding capacity and/or binding affinity of the IL-2 variant for human CD132 is decreased by about 1%, 5%, 10%, 20%, 30%, 40%, 50%, 60%, 70%, 80%, 90%, 95%, or about 100%, or more. In an embodiment, the binding capacity and/or binding affinity of the IL-2 variant for human CD132 is decreased by about 0.5-fold, 1-fold, 2-fold, 3-fold, 4-fold, 5-fold, 6-fold, 7-fold, 8-fold, 9-fold, or about 10-fold, or more.

[0358] In an embodiment, the IL-2 variant has altered (e.g., reduced or decreased) binding capacity and/or binding affinity for the human dimeric IL-2 receptor comprising human CD122 and human CD132 in vitro and/or in vivo, relative to a wild-type IL-2 or a reference IL-2 variant. In an embodiment, the IL-2 variant has reduced or decreased binding capacity and/or binding affinity for the human dimeric IL-2 receptor comprising human CD122 and human CD132 relative to a wild-type IL-2. In an embodiment, the IL-2 variant has reduced or decreased binding capacity and/or binding affinity for the human dimeric IL-2 receptor comprising human CD122 and human CD132 relative to a reference IL-2 variant. In an embodiment, the binding capacity and/or binding affinity of the IL-2 variant for the human dimeric IL-2 receptor comprising human CD122 and human CD132 is decreased by about 1%, 5%, 10%, 20%, 30%, 40%, 50%, 60%, 70%, 80%, 90%, 95%, or about 100%, or more. In an embodiment, the binding capacity and/or binding affinity of the IL-2 variant for the human dimeric IL-2 receptor comprising human CD122 and human CD132 is decreased by about 0.5-fold, 1-fold, 2-fold, 3-fold, 4-fold, 5-fold, 6-fold, 7-fold, 8-fold, 9-fold, or about 10-fold, or more.

[0359] In an embodiment, the IL-2 variant has reduced or decreased binding affinity for CD122/CD132 heterodimer (e.g., human CD122/CD132 heterodimer), e.g., decreased by about 1%, about 2%, about 3%, about 4%, about 5%, about 10%, about 15%, about 20%, about 25%, about 30%, about 35%, about 40%, about 45%, about 50%, about 55%, about 60%, about 65%, about 70%, about 75%, about 80%, about 85%, about 90%, about 95%, about 100% or more, or e.g., decreased by about 0.5-fold, about 1-fold, about 1.5-fold, about 2-fold, about 2.5-fold, about 3-fold, about 3.5-fold, about 4-fold, about 4.5-fold, about 5-fold, about 5.5-fold, about 6-fold, about 6.5-fold, about 7-fold, about 7.5-fold, about 8-fold, about 8.5-fold, about 9-fold, about 9.5-fold, about 10-fold or more e.g., relative to an IL-2 agent comprising a wild-type IL-2 or an IL-2 agent comprising a reference IL-2 variant e.g., as determined by yeast surface display, surface plasmon resonance (e.g. Biacore) and/or bio-layer interferometry (e.g. Octet binding).

[0360] In an embodiment, the IL-2 variant binds to CD122/CD132 heterodimer (e.g., human CD122/CD132 heterodimer) with low affinity, e.g., with a dissociation constant (KD) of about 0.2-20 nM, e.g., about 0.2, about 0.3, about 0.4, about 0.5, about 0.6, about 0.7, about 0.8, about 0.9, about 1, about 1.1, about 1.2, about 1.3, about 1.4. about 1.5, about 2, about 3, about 4, about 5, about 6, about 7, about 8, about 9, about 10, about 11, about 12, about 13, about 14, about 15, about 16, about 17, about 18, or about 20 nM, or e.g., about 0.5 to about 15 nM, about 1 to about 10 nM, about 2 to about 5 nM, about 0.2 to about 0.3 nM, about 0.3 to about 0.4 nM, about 0.4 to about 0.5 nM, about 0.5 to about 0.6 nM, about 0.6 to about 0.7 nM, about 0.7 to about 0.8 nM, about 0.8 to about 0.9 nM, about 0.9 to about 1 nM, about 1 to about 1.1 nM, about 1.1 to about 1.2 nM, about 1.2 to about 1.3 nM, about 1.3 to about 1.4 nM, about 1.4 to about 1.5 nM, about 1.5 to about 2 nM, about 2 to about 3 nM, about 3 to about 4 nM, about 4 to about 5 nM, about 5 to about 6 nM, about 6 to about 7 nM, about 7 to about 8 nM, about 8 to about 9 nM, about 9 to about 10 nM, about 10 to about 11 nM, about 11 to about 12 nM, about 12 to about 13 nM, about 13 to about 14 nM, about 14 to about 15 nM, about 15 to about 16 nM, about 16 to about 17 nM, about 17 to about 18 nM, about 18 to about 19 nM, or about 19 to about 20 nM, or e.g., greater than about 0.2, about 0.3, about 0.4, about 0.5, about 0.6, about 0.7, about 0.8, about 0.9, about 1, about 1.1, about 1.2, about 1.3, about 1.4. about 1.5, about 2, about 3, about 4, about 5, about 6, about 7, about 8, about 9, about 10, about 11, about 12, about 13, about 14, about 15, about 16, about 17, about 18, or about 20 nM, e.g., as determined by yeast surface display.

[0361] In an embodiment, the IL-2 variant binds to CD122/CD132 heterodimer (e.g., human CD122/CD132 heterodimer) with low affinity, e.g., with a dissociation constant (KD) of about 0.2-300 nM, e.g., about 0.2 nM, about 0.5 nM, about 1 nM, about 2 nM, about 5 nM, about 10 nM, about 15 nM, about 20 nM, about 25 nM, about 30 nM, about 40 nM, about 50 nM, about 60 nM, about 70 nM, about 80 nM, about 90 nM, about 100 nM, about 110 nM, about 120 nM, about 130 nM, about 140 nM, about 150 nM, about 160 nM, about 170 nM, about 180 nM, about 190 nM, about 200 nM, about 210 nM, about 220 nM, about 230 nM, about 240 nM, about 250 nM, about 260 nM, about 270 nM, about 280 nM, about 290 nM, or about 300 nM, or e.g., about 0.5 to about 15 nM, about 1 to about 10 nM, about 2 to about 5 nM, about 0.2 nM to about 0.5 nM, about 0.5 nM to about 1 nM, about 1 to about 2 nM, about 2 nM to about 5 nM, about 5 nM to about 10 nM, about 10 nM to about 15 nM, about 15 nM to about 20 nM, about 20 nM to about 25 nM, about 25 to about 30 nM, about 30 nM to about 40 nM, about 40 nM to about 50 nM, about 50 to about 60 nM, about 60 to about 70 nM, about 70 nM to about 80 nM, about 80 nM to about 90 nM, about 90 nM to about 100 nM, about 100 nM to about 110 nM, about 110 nM to about 120 nM, about 120 nM to about 130 nM, about 130 nM to about 140 nM, about 140 nM to about 150 nM, about 150 nM to about 160 nM, about 160 nM to about 170 nM, about 170 nM to about 180 nM, about 180 nM to about 190 nM, about 190 nM to about 200 nM, about 200 nM to about 210 nM, about 210 nM to about 220 nM, about 220 nM to about 230 nM, about 230 nM to about 240 nM, about 240 nM to about 250 nM, about 250 nM to about 260 nM, about 260 nM to about 270 nM, about 270 nM to about 280 nM, about 280 nM to about 290 nM, or about 290 nM to about 300 nM, or e.g., greater than about 0.2, about 0.5, about 1, about 2, about 5, about 10, about 15, about 20 nM, about 25 nM, about 30 nM, about 40 nM, about 50 nM, about 60 nM, about 70 nM, about 80 nM, about 90 nM, about 100 nM, about 110 nM, about 120 nM, about 130 nM, about 140 nM, about 150 nM, about 160 nM, about 170 nM, about 180 nM, about 190 nM, about 200 nM, about 210 nM, about 220 nM, about 230 nM, about 240 nM, about 250 nM, about 260 nM, about 270 nM, about 280 nM, about 290 nM, or greater than about 300 nM, e.g., as determined by surface plasmon resonance (e.g. Biacore) and/or biolayer interferometry (e.g. Octet binding).

[0362] In an embodiment, the IL-2 variant has altered (e.g., enhanced, increased, and/or selective) binding to Tregs in vitro and/or in vivo, relative to a wild-type IL-2 or a reference IL-2 variant. In an embodiment, the IL-2 variant has enhanced or increased binding to Tregs relative to a wild-type IL-2. In an embodiment, the IL-2 variant has selective binding to Tregs relative to IL-2 (e.g., wild type human IL-2). In an embodiment, the IL-2 variant has enhanced or increased binding to Tregs relative to a reference IL-2 variant. In an embodiment, the IL-2 variant has selective binding to Tregs relative to a reference IL-2 variant. In an embodiment, the binding to Tregs is increased by about 1%, 5%, 10%, 20%, 30%, 40%, 50%, 60%, 70%, 80%, 90%, 95%, or about 100%, or more. In an embodiment, the binding to Tregs is increased by about 0.5-fold, 1-fold, 2-fold, 3-fold, 4-fold, 5-fold, 6-fold, 7-fold, 8-fold, 9-fold, or about 10-fold, or more.

[0363] In an embodiment, the IL-2 variant has altered (e.g., enhanced, increased, and/or selective) activation of the IL-2 signaling pathway in Tregs in vitro and/or in vivo, relative to a wild-type IL-2 or a reference IL-2 variant. In an embodiment, the IL-2 variant has enhanced or increased activation of the IL-2 signaling pathway in Tregs relative to a wild-type IL-2. In an embodiment, the IL-2 variant has selective activation of the IL-2 signaling pathway in Tregs relative to a wild-type IL-2. In an embodiment, the IL-2 variant has enhanced or increased activation of the IL-2 signaling pathway in Tregs relative to a reference IL-2 variant. In an embodiment, the IL-2 variant has selective activation of the IL-2 signaling pathway in Tregs relative to a reference IL-2 variant. In an embodiment, the activation of the IL-2 signaling pathway in Tregs is increased by about 1%, 5%, 10%, 20%, 30%, 40%, 50%, 60%, 70%, 80%, 90%, 95%, or about 100%, or more. In an embodiment, the activation of the IL-2 signaling pathway in Tregs is increased by about 0.5-fold, 1-fold, 2-fold, 3-fold, 4-fold, 5-fold, 6-fold, 7-fold, 8-fold, 9-fold, or about 10-fold, or more.

[0364] In an embodiment, the IL-2 variant selectively activates IL-2 signaling in T regulatory cells in vitro and/or in vivo, e.g., having an T helper EC50/Treg EC50 ratio greater than about 1, about 2, about 3, about 4, about 5, 6, 7, 8, 9, 10, 11, 12, 13, 14, 15, 16, 17, 18, 19, 20, 21, 22, 23, 24, 25, 26, 27, 28, 29, 30, 35, 40, 45, 50, 55, 60, 65, 70, 75, 80, 85, 90, 95, 100, 150, 200, 250, 300, 350, 400, 450, 500, 600, 700, 800, 900, 1000, 1500, 2000, 2500, or about 3000 or more relative to an IL-2 agent comprising a wild-type IL-2 or an IL-2 agent comprising a reference IL-2 variant e.g., as determined flow cytometry.

[0365] In an embodiment, the IL-2 variant selectively activates IL-2 signaling in T regulatory cells in vitro and/or in vivo, e.g., having an NK cell EC50/Treg EC50 ratio greater than e.g., about 1, about 2, about 3, about 4, about 5, 6, 7, 8, 9, 10, 11, 12, 13, 14, 15, 16, 17, 18, 19, 20, 21, 22, 23, 24, 25, 26, 27, 28, 29, 30, 35, 40, 45, 50, 55, 60, 65, 70, 75, 80, 85, 90, 95, 100, 150, 200, 250, 300, 350, 400, 450, 500, 600, 700, 800, 900, 1000, 1500, 2000, 2500, or about 3000 or more, or e.g., greater than 1 and about 1 to 2, about 2 to 3, about 3 to 4, about 4 to 5, greater than 1 and about 1 to 10, greater than 1 and about 1 to 20, greater than 1 and about 1 to 30, greater than 1 and about 1 to 40, greater than 1 and about 1 to 50, about 2 to 10, about 2 to 20, about 2 to 30, about 2 to 40, 2 to 50, about 5 to 10, about 5 to 20, about 5 to 30, about 5 to 40, about 5 to 50, about 10 to 20, about 10 to 30, about 10 to 40 about 10 to 50, about 20 to 40, about 20 to 50, about 50 to 100, about 100 to 200, about 200 to 500, about 500 to 1000, about 1000 to 2000, or about 1000 to 3000, relative to an IL-2 agent comprising a wild-type IL-2 or an IL-2 agent comprising a reference IL-2 variant e.g., as determined flow cytometry.

[0366] In an embodiment, the IL-2 variant has altered (e.g., enhanced, increased, and/or selective) ability to induce or promote Treg expansion, activity, survival, and/or proliferation in vitro and/or in vivo, relative to a wild-type IL-2 or a reference IL-2 variant. In an embodiment, the IL-2 variant has enhanced or increased ability to induce or promote Treg expansion, activity, survival, and/or proliferation relative to a wild-type IL-2. In an embodiment, the IL-2 variant has selective ability to induce or promote Treg expansion, activity, survival, and/or proliferation relative to a wild-type IL-2. In an embodiment, the IL-2 variant has enhanced or increased ability to induce or promote Treg expansion, activity, survival, and/or proliferation relative to a reference IL-2 variant. In an embodiment, the IL-2 variant has selective ability to induce or promote Treg expansion, activity, survival, and/or proliferation relative to a reference IL-2 variant. In an embodiment, the ability to induce or promote Treg expansion, activity, survival, and/or proliferation is increased by about 1%, 5%, 10%, 20%, 30%, 40%, 50%, 60%, 70%, 80%, 90%, 95%, or about 100%, or more. In an embodiment, the ability to induce or promote Treg expansion, activity, survival, and/or proliferation is increased by about 0.5-fold, 1-fold, 2-fold, 3-fold, 4-fold, 5-fold, 6-fold, 7-fold, 8-fold, 9-fold, or about 10-fold, or more.

[0367] In an embodiment, the IL-2 variant has enhanced or increased potency and/or ability to induce or promote T regulatory cell activity, e.g., having an EC50 for Tregs that is lower by about 1%, about 2%, about 3%, about 4%, about 5%, about 10%, about 15%, about 20%, about 25%, about 30%, about 35%, about 40%, about 45%, about 50%, about 55%, about 60%, about 65%, about 70%, about 75%, about 80%, about 85%, about 90%, about 95%, about 100% or more, or e.g., decreased by about 0.5-fold, about 1-fold, about 1.5-fold, about 2-fold, about 2.5-fold, about 3-fold, about 3.5-fold, about 4-fold, about 4.5-fold, about 5-fold, about 5.5-fold, about 6-fold, about 6.5-fold, about 7-fold, about 7.5-fold, about 8-fold, about 8.5-fold, about 9-fold, about 9.5-fold, about 10-fold or more e.g., relative to an IL-2 agent comprising a wild-type IL-2 or an IL-2 agent comprising a reference IL-2 variant e.g., as determined flow cytometry.

[0368] In an embodiment, the IL-2 variant has reduced or decreased potency and/or ability to induce or promote T regulatory cell activity, e.g., having an EC50 for Tregs that is higher by about 1%, about 2%, about 3%, about 4%, about 5%, about 10%, about 15%, about 20%, about 25%, about 30%, about 35%, about 40%, about 45%, about 50%, about 55%, about 60%, about 65%, about 70%, about 75%, about 80%, about 85%, about 90%, about 95%, or about 100% or more, or e.g., decreased by about 0.5-fold, about 1-fold, about 1.5-fold, about 2-fold, about 2.5-fold, about 3-fold, about 3.5-fold, about 4-fold, about 4.5-fold, about 5-fold, about 5.5-fold, about 6-fold, about 6.5-fold, about 7-fold, about 7.5-fold, about 8-fold, about 8.5-fold, about 9-fold, about 9.5-fold, about 10-fold, about 50-fold, about 100-fold, about 200-fold, about 500-fold, about 1000-fold, about 2000-fold, about 5000-fold, about 10,000, about 15,000-fold, or about 20,000-fold or more e.g., relative to an IL-2 agent comprising a wild-type IL-2 or an IL-2 agent comprising a reference IL-2 variant e.g., as determined flow cytometry.

[0369] In an embodiment, the T helper cell described herein is a CD45+CD3+CD4+Foxp3− cell, e.g., determined by flow cytometry. In an embodiment, the Treg described herein is CD45+CD3+CD4+Foxp3+ cell, e.g., determined by flow cytometry. In an embodiment, the NK cell described herein is a CD45+CD3− cell that is CD56+ and/or CD16+, e.g., determined by flow cytometry. In an embodiment, the NK cell described herein is a CD45+CD3-CD56+ cell, e.g., determined by flow cytometry.

[0370] In an embodiment, the IL-2 variant has one or more of the same, or substantially the same, structural and/or functional properties, as a wild-type IL-2 or a reference IL-2 variant.

[0371] In an embodiment, the reference IL-2 variant comprises an amino acid sequence that has about 75%, 80%, 85%, 90%, 91%, 92%, 93%, 94%, 95%, 96%, 97%, 98%, 99%, or more sequence identity to an IL-2 variant described herein. In an embodiment, the reference IL-2 variant comprises the amino acid sequence of SEQ ID NO: 1 (IL-2 C125S). In an embodiment, the IL-2 variant comprises an amino acid sequence that is at least 80%, 85%, 90%, 95%, or 98% identical to the amino acid sequence of SEQ ID NO: 1 and comprises one or more (2, 3, 4, 5, 6, 7, 8, 9, 10, or more) amino acid alterations (e.g., substitutions) described herein.

[0372] For purposes of this disclosure, IL-2 variant position numbering begins at the first amino acid following the signal peptide of the exemplary wild type (WT) human IL-2 polypeptide: MYRMQLLSCIALSLALVTNS/A1/P2/T3/S4/S5/S6/T7/K8/K9/T10/Q11/L12/Q13/L14/E15/H16/L1 7/L18/L19/D20/L21/Q22/M23/24/L25/N26/G27/28/N29/N30/Y31/K32/N33/P34/K35/L36/T37/R38/M39/L40/T41/F42/K43/F44/Y45/M46/P47/K48/K49/A50/T51/E52/L53/K54/H55/L56/Q57/C58/L59/E60/E61/E62/L63/K64/P65/L66/E67/E68/V69/L70/N71/L72/A73/Q74/S75/K76/N77/F78/H79/L80/R81/P82/R83/D84/L85/I86/587/N88/I89/N90/V91I92/V93/L94/E95/L96/K97/G98/599/E100/T101/T102/F103/M104/C105/E106/Y107/A108/D109/E110/T111/A112/T1134114/V115/E116/F117/L118/N119/R120/W121/I122/T123/F124/C125/Q126/S127/I128/I129/S130/T131/L132/T133 (SEQ ID NO: 360; Uniprot P60568; signal peptide underlined). The corresponding amino acid sequence without the signal peptide is shown as SEQ ID NO: 1031.

[0373] In an embodiment, the IL-2 agent comprises amino acid alteration(s) (e.g., substitution(s)) at position(s) corresponding to human IL-2 (e.g., comprising the amino acid sequence of SEQ ID NO: 1031).

[0374] In an embodiment, the IL-2 variant comprises the amino acid sequence of A1/P2/X3/S4/S5/S6/T7/K8/K9/T10/Q11/L12/Q13/L14/E15/X16/L17/L18/L19/D20/L21/Q22/M23/I2 4/L25/N26/G27/X28/N29/N30/Y31/K32/N33/P34/X35/L36/T37/X38/M39/L40/T41/X42/K43/F44/Y 45/M46/P47/K48/K49/A50/T51/E52/L53/K54/H55/L56/Q57/C58/L59/E60/E61/E62/L63/K64/P65/L 66/E67/X68/X69/L70/N71/L72/A73/X74/575/K76/N77/F78/H79/L80/R81/P82/R83/X84/L85/I86/X8 7/X88/I89/N90/V91/X92/V93/L94/E95/L96/K97/G98/S99/E100/T101/T102/F103/M104/C105/E106/Y107/A108/D109/E110/T111/A112/T113/I114/V115/E116/F117/L118/N119/R120/W1214122/T123/F124/X125/X126/S127/I128/I129/S130/T131/L132/T133 (SEQ ID NO: 1032),

[0375] wherein: X3 is T or A; X16 is H, L or N; X28 is I, T or F; X35 is K or E; X38 is R, E, N or Q; X42 is F, A, K or Q; X68 is E, Q or N; X69 is V or A; X74 is Q or P; X84 is D or V; X87 is S or R; X88 is N, D, L or S; X92 is I or S; X125 is C or S; and X126 is Q, K, R or T, provided that the IL-2 variant does not comprise the amino acid sequence of SEQ ID NO: 1 or 1031. In an embodiment, the IL-2 variant comprises, or consists of, an IL-2 variant amino acid sequence described herein.

[0376] In an embodiment, the IL-2 variant comprises an amino acid alteration (e.g., substitution) at one or more (e.g., 2, 3, 4, 5, 6, 7, 8, 9, 10, 11, 12, 13, 14, or all) of positions, as described herein. In an embodiment, the IL-2 variant comprises an amino acid alteration (e.g., substitution) at one or more (e.g., 2, 3, 4, 5, 6, 7, 8, 9, 10, 11, 12, 13, 14, or all) of positions chosen from T3, H16, 128, K35, R38, F42, E68, V69, Q74, D84, S87, N88, 192, C125, or Q126.

[0377] In an embodiment, the IL-2 variant comprises an amino acid alteration (e.g., substitution) at position T3. In an embodiment, the IL-2 variant comprises an amino acid alteration (e.g., substitution) at position H16. In an embodiment, the IL-2 variant comprises an amino acid alteration (e.g., substitution) at position I28. In an embodiment, the IL-2 variant comprises an amino acid alteration (e.g., substitution) at position K35. In an embodiment, the IL-2 variant comprises an amino acid alteration (e.g., substitution) at position R38. In an embodiment, the IL-2 variant comprises an amino acid alteration (e.g., substitution) at position F42. In an embodiment, the IL-2 variant comprises an amino acid alteration (e.g., substitution) at position E68. In an embodiment, the IL-2 variant comprises an amino acid alteration (e.g., substitution) at position V69. In an embodiment, the IL-2 variant comprises an amino acid alteration (e.g., substitution) at position Q74. In an embodiment, the IL-2 variant comprises an amino acid alteration (e.g., substitution) at position D84. In an embodiment, the IL-2 variant comprises an amino acid alteration (e.g., substitution) at position S87. In an embodiment, the IL-2 variant comprises an amino acid alteration (e.g., substitution) at position N88. In an embodiment, the IL-2 variant comprises an amino acid alteration (e.g., substitution) at position I92. In an embodiment, the IL-2 variant comprises an amino acid alteration (e.g., substitution) at position C125. In an embodiment, the IL-2 variant comprises an amino acid alteration (e.g., substitution) at position Q126.

[0378] In an embodiment, the IL-2 variant comprises an amino acid alteration (e.g., substitution) at position V69, Q74, or a combination thereof. In an embodiment, the IL-2 variant comprises an amino acid alteration (e.g., substitution) at positions V69 and Q74. In an embodiment, the IL-2 variant comprises the amino acid substitution V69A. In an embodiment, the IL-2 variant comprises the amino acid substitution Q74P.

[0379] In an embodiment, the IL-2 variant comprises an amino acid alteration (e.g., substitution) at position H16, 192, D84, or a combination thereof. In an embodiment, the IL-2 variant comprises an amino acid alteration (e.g., substitution) at position H16, optionally wherein the amino acid substitution is H16N, H16L, or H16D. In an embodiment, the IL-2 variant comprises the amino acid substitution H16N. In an embodiment, the IL-2 variant comprises the amino acid substitution H16L. In an embodiment, the IL-2 variant comprises the amino acid substitution H16D.

[0380] In an embodiment, the IL-2 variant comprises an amino acid alteration (e.g., substitution) at position at 192, optionally wherein the amino acid substitution is I92S. In an embodiment, the IL-2 variant comprises the amino acid substitution I92S.

[0381] In an embodiment, the IL-2 variant comprises an amino acid alteration (e.g., substitution) at position D84, optionally wherein the amino acid substitution is D84V. In an embodiment, the IL-2 variant comprises the amino acid substitution is D84V.

[0382] In an embodiment, the IL-2 variant comprises an amino acid alteration (e.g., substitution) at position K35, R38, F42, E68, or a combination thereof. In an embodiment, the IL-2 variant comprises an amino acid alteration (e.g., substitution) at position K35, optionally wherein the amino acid substitution is K35E. In an embodiment, IL-2 variant comprises the amino acid substitution K35E.

[0383] In an embodiment, the IL-2 variant comprises an amino acid alteration (e.g., substitution) at position R38, optionally wherein the amino acid substitution is R38E, R38N or R38Q. In an embodiment, the IL-2 variant comprises the amino acid substitution R38N. In an embodiment, the IL-2 variant comprises the amino acid substitution R38Q.

[0384] In an embodiment, the IL-2 variant comprises an amino acid alteration (e.g., substitution) at position F42, optionally wherein the amino acid substitution is F42K or F42Q. In an embodiment, the IL-2 variant comprises the amino acid substitution F42K. In an embodiment, the IL-2 variant comprises the amino acid substitution F42Q.

[0385] In an embodiment, the IL-2 variant comprises an amino acid alteration (e.g., substitution): (i) at (a) positions V69 and Q74, (b) position K35, or (c) positions V69, Q74, and K35; and (ii) at one, two, or all of positions H16, 192, or D84. In an embodiment, the IL-2 variant further comprises an amino acid alteration (e.g., substitution) at one, two, or all of positions R38, F42, or E68.

[0386] In an embodiment, the IL-2 variant comprises an amino acid alteration (e.g., substitution): (i) at (a) positions V69 and Q74, (b) position K35, or (c) positions V69, Q74, and K35; and (ii) at (a) one, two, or all of positions H16, 192, or D84; or (b) one, two, or all of positions R38, F42, or E68.

[0387] In an embodiment, the IL-2 variant comprises an amino acid alteration (e.g., substitution): (i) at (a) positions V69 and Q74, (b) position K35, or (c) positions V69, Q74, and K35; and (ii) at (a) one, two, or all of positions H16, 192, or D84; and (b) one, two, or all of positions R38, F42, or E68.

[0388] In an embodiment, the IL-2 variant comprises an amino acid alteration (e.g., substitution) at position V69, Q74, and H16, optionally wherein the amino acid substitution is V69A, Q74P, and H16N or H16L, respectively. In an embodiment, the IL-2 variant comprises the amino acid substitutions V69A, Q74P, and H16N or H16L. In an embodiment, the IL-2 variant comprises the amino acid substitutions V69A, Q74P, and H16N. In an embodiment, the IL-2 variant comprises the amino acid substitutions V69A, Q74P, and H16L.

[0389] In an embodiment, the IL-2 variant comprises an amino acid alteration (e.g., substitution) at position V69, Q74, and 192, optionally wherein the amino acid substitution is V69A, Q74P, and I92S, respectively. In an embodiment, the IL-2 variant comprises the amino acid substitutions V69A, Q74P, and I92S.

[0390] In an embodiment, the IL-2 variant comprises an amino acid alteration (e.g., substitution) at position V69, Q74, and D84, optionally wherein the amino acid substitution is V69A, Q74P, and D84V, respectively. In an embodiment, the IL-2 variant comprises the amino acid substitutions V69A, Q74P, and D84V.

[0391] In an embodiment, the IL-2 variant comprises an amino acid alteration (e.g., substitution) at position V69, Q74, and R38, optionally wherein the amino acid substitution is V69A, Q74P, and R38Q, respectively. In an embodiment, the IL-2 variant comprises the amino acid substitutions V69A, Q74P, and R38Q.

[0392] In an embodiment, the IL-2 variant comprises an amino acid alteration (e.g., substitution) at position V69, Q74, and F42, optionally wherein the amino acid substitution is V69A, Q74P, and F42Q, respectively. In an embodiment, the IL-2 variant comprises the amino acid substitutions V69A, Q74P, and F42Q.

[0393] In an embodiment, the IL-2 variant comprises an amino acid alteration (e.g., substitution) at position V69, Q74, and R38, optionally wherein the amino acid substitution is V69A, Q74P, and R38N, respectively. In an embodiment, the IL-2 variant comprises the amino acid substitutions V69A, Q74P, and R38N.

[0394] In an embodiment, the IL-2 variant comprises an amino acid alteration (e.g., substitution) at position V69, Q74, and R38, optionally wherein the amino acid substitution is V69A, Q74P, and R38E, respectively. In an embodiment, the IL-2 variant comprises the amino acid substitution V69A, Q74P, and R38E.

[0395] In an embodiment, the IL-2 variant comprises an amino acid alteration (e.g., substitution) at position V69, Q74, K35, and H16, optionally wherein the amino acid substitution is V69A, Q74P, K35E, and H16N, respectively. In an embodiment, the IL-2 variant comprises the amino acid substitutions V69A, Q74P, K35E, and H16N.

[0396] In an embodiment, the IL-2 variant comprises an amino acid alteration (e.g., substitution) at position V69, Q74, K35, H16, and R38, optionally wherein the amino acid substitution is V69A, Q74P, K35E, H16N, and R38N, respectively. In an embodiment, the IL-2 variant comprises the amino acid substitutions V69A, Q74P, K35E, H16N, and R38N.

[0397] In an embodiment, the IL-2 variant comprises an amino acid alteration (e.g., substitution) at position V69, Q74, H16, and R38, optionally wherein the amino acid substitution is V69A, Q74P, H16N, and R38N or R38Q, respectively. In an embodiment, the IL-2 variant comprises the amino acid substitutions V69A, Q74P, H16N, and R38N or R38Q. In an embodiment, the IL-2 variant comprises the amino acid substitutions V69A, Q74P, H16N, and R38N. In an embodiment, the IL-2 variant comprises the amino acid substitutions V69A, Q74P, H16N, and R38Q.

[0398] In an embodiment, the IL-2 variant comprises an amino acid alteration (e.g., substitution) at position 128, E68, S87, N88, Q126, or a combination thereof.

[0399] In an embodiment, the IL-2 variant comprises an amino acid alteration (e.g., substitution) at position 128, optionally wherein the amino acid substitution is I28T or I28F. In an embodiment, the IL-2 variant comprises the amino acid substitution I28T. In an embodiment, the IL-2 variant comprises the amino acid substitution I28F.

[0400] In an embodiment, the IL-2 variant comprises an amino acid alteration (e.g., substitution) at position E68, optionally wherein the amino acid substitution is E68Q or E68N. In an embodiment, the IL-2 variant comprises the amino acid substitution E68Q. In an embodiment, the IL-2 variant comprises the amino acid substitution E68N.

[0401] In an embodiment, the IL-2 variant comprises an amino acid alteration (e.g., substitution) at position S87, optionally wherein the amino acid substitution is S87R. In an embodiment, the IL-2 variant comprises the amino acid substitution S87R.

[0402] In an embodiment, the IL-2 variant comprises an amino acid alteration (e.g., substitution) at position N88, optionally wherein the amino acid substitution is N88S, N88L, or N88D. In an embodiment, the IL-2 variant comprises the amino acid substitution N88S, N88L, or N88D. In an embodiment, the IL-2 variant comprises the amino acid substitution N88S. In an embodiment, the IL-2 variant comprises the amino acid substitution N88L. In an embodiment, the IL-2 variant comprises the amino acid substitution N88D.

[0403] In an embodiment, the IL-2 variant comprises an amino acid alteration (e.g., substitution) at position Q126, optionally wherein the amino acid substitution is Q126T, Q126K, or Q126R. In an embodiment, the IL-2 variant comprises the amino acid substitution Q126T, Q126K, or Q126R. In an embodiment, the IL-2 variant comprises the amino acid substitution Q126T, Q126K, or Q126R. In an embodiment, the IL-2 variant comprises the amino acid substitution Q126T. In an embodiment, the IL-2 variant comprises the amino acid substitution Q126K. In an embodiment, the IL-2 variant comprises the amino acid substitution Q126R.

[0404] In an embodiment, the IL-2 variant comprises an amino acid alteration (e.g., substitution) at position C125, optionally wherein the amino acid substitution is C125S. In an embodiment, the IL-2 variant comprises the amino acid substitution C125S.

[0405] In an embodiment, the IL-2 variant comprises an amino acid alteration (e.g., substitution) at position T3, optionally wherein the amino acid substitution is T3A. In an embodiment, the IL-2 variant comprises the amino acid substitution T3A.

[0406] In an embodiment, the IL-2 variant comprises an amino acid alteration (e.g., substitution) at position V69, Q74, and C125, optionally wherein the amino acid substitution is V69A, Q74P, and C125S, respectively. In an embodiment, the IL-2 variant comprises the amino acid substitutions V69A, Q74P, and C125S.

[0407] In an embodiment, the IL-2 variant comprises an amino acid alteration (e.g., substitution) at position T3, H16, 192, or a combination thereof, optionally wherein the amino acid substitution is T3A, H16N, and I92S, respectively.

[0408] In an embodiment, the IL-2 variant comprises an amino acid alteration (e.g., substitution) at position H16, V69, Q74, and C125, optionally wherein the amino acid substitution is H16N, V69A, Q74P, and C125S, respectively. In an embodiment, the IL-2 variant comprises the amino acid substitutions H16N, V69A, Q74P, and C125S.

[0409] In an embodiment, the IL-2 variant comprises an amino acid alteration (e.g., substitution) at position H16, V69, Q74, and C125, optionally wherein the amino acid substitution is H16L, V69A, Q74P, and C125S, respectively. In an embodiment, the IL-2 variant comprises the amino acid substitutions H16L, V69A, Q74P, and C125S.

[0410] In an embodiment, the IL-2 variant comprises an amino acid alteration (e.g., substitution) at position H16, V69, Q74, 192, and C125, optionally wherein the amino acid substitution is H16L, V69A, Q74P, I92S, and C125S, respectively. In an embodiment, the IL-2 variant comprises the amino acid substitutions H16L, V69A, Q74P, I92S, and C125S.

[0411] In an embodiment, the IL-2 variant comprises an amino acid alteration (e.g., substitution) at position T3, V69, Q74, and C125, optionally wherein the amino acid substitution is T3A, V69A, Q74P, and C125S, respectively. In an embodiment, the IL-2 variant comprises the amino acid substitutions T3A, V69A, Q74P, and C125S.

[0412] In an embodiment, the IL-2 variant comprises an amino acid alteration (e.g., substitution) at position T3, H16, V69, Q74, and C125, optionally wherein the amino acid substitution is T3A, H16N or H16L, V69A, Q74P, and C125S, respectively. In an embodiment, the IL-2 variant comprises the amino acid substitutions T3A, H16N, V69A, Q74P, and C125S. In an embodiment, the IL-2 variant comprises the amino acid substitutions T3A, H16L, V69A, Q74P, and C125S.

[0413] In an embodiment, the IL-2 variant comprises an amino acid alteration (e.g., substitution) at position T3, V69, Q74, 192, and C125, optionally wherein the amino acid substitution is T3A, V69A, Q74P, I92S, and C125S, respectively. In an embodiment, the IL-2 variant comprises the amino acid substitutions T3A, V69A, Q74P, I92S, and C125S. In an embodiment, the IL-2 variant comprises the amino acid substitutions T3A, V69A, Q74P, I92S, and C125S.

[0414] In an embodiment, the IL-2 variant comprises an amino acid alteration (e.g., substitution) at position H16, K35, V69 and Q74, optionally wherein the amino acid substitution is H16L, K35E, V69A, and Q74P, respectively. In an embodiment, the IL-2 variant comprises the amino acid substitutions H16L, K35E, V69A, and Q74P.

[0415] In an embodiment, the IL-2 variant comprises an amino acid alteration (e.g., substitution) at position H16, R38, V69A, and Q74P, optionally wherein the amino acid substitution is H16L, R38Q, V69A, and Q74P, respectively. In an embodiment, the IL-2 variant comprises the amino acid substitutions H16L, R38Q, V69A, and Q74P.

[0416] In an embodiment, the IL-2 variant comprises amino acid substitutions H16L, V69A, Q74P, and C125S. In an embodiment, the IL-2 variant comprises amino acid substitutions H16N, V69A, Q74P, and C125S.

[0417] There are various technical effects associated with the presence of the particular sets of mutations described herein, for example, a set of mutations comprising an amino acid substitution at position H16, in combination with amino acid substitutions at positions V69, Q74, and C125 (e.g., H16L, V69A, Q74P, and C125S). Without wishing to be bound by theory, it is believed that in an embodiment, an IL-2 variant comprising the aforesaid mutations also has reduced binding affinity for CD122 and/or CD132, which increases the potency and selectivity of the IL-2 variant for regulatory T cells (Treg) compared to other T cell types. Without wishing to be bound by theory, it is also believed that in an embodiment, an IL-2 variant comprising the aforesaid mutations is significantly stable, e.g., due to the presence of stabilizing V69A and Q74P mutations. For example, it was unexpected discovered that the V69A and Q74P substitutions do not substantially increase the binding affinity of the IL-2 variant for CD25, but rather stabilize the IL-2 variant in an active conformation sufficient for binding to CD25. Therefore, an IL-2 variant comprising these mutations selectively activates regulatory T cells (Treg) and is significantly stable. Without wishing to be bound by theory, it is further believed that in an embodiment, an IL-2 variant comprising the aforesaid mutations has reduced or decreased binding capacity and/or binding affinity for CD25, which improves the lifetime of the IL-2 variant. Without wishing to be bound by theory, it is also believed that in an embodiment, an IL-2 variant comprising these mutations does not substantially promote expansion, activation, survival, and/or proliferation of T effector cells and/or natural killer (NK) cells in vitro and/or in vivo. Without wishing to be bound by theory, it is further believed that in an embodiment, an IL-2 variant comprising the aforesaid mutations has reduced incorrect disulfide pairing and improved stability, e.g., due to the presence of the C125S mutation. In an embodiment, an IL-2 agent comprising the H16L mutation has reduced binding affinity for CD122 and/or CD132 and/or increased potency and selectivity for Treg over other T cell types, compared to an IL-2 agent comprising other H16 mutations. These properties make an IL-2 variant comprising these mutations particularly suitable for treating disorders and conditions arising from abnormal immune responses, such as autoimmune diseases.

[0418] Thus, in an embodiment, an IL-2 variant (e.g., IL-2 variant or IL-2 fusion protein) comprising an amino acid substitution at position H16 in combination with amino acid substitutions at positions V69, Q74, and C125 (e.g., H16L, V69A, Q74P, and C125S), has inter alia one or more (e.g., 2, 3, 4, 5, 6, 7, or all) of the following properties relative to a wild-type IL-2 or a reference IL-2 variant that does not comprise the amino acid substitutions: (i) enhanced or increased stability in vitro or in vivo; (ii) reduced or decreased binding capacity and/or binding affinity for human CD122 in vitro and/or in vivo; (iii) reduced or decreased binding capacity and/or binding affinity for human CD132 in vitro and/or in vivo; (iv) reduced or decreased affinity of the IL-2 variant for the heterodimeric IL-2 receptor composed of human CD122 and human CD132 (i.e. human CD122/CD132 heterodimer) in vitro and/or in vivo; (v) reduced or decreased binding capacity and/or binding affinity for human CD25 in vitro and/or in vivo; (vi) selective binding to regulatory T cells (e.g. Foxp3⁺ T cells); (vii) selective activation of the IL-2 signaling pathway in T regulatory cells (Tregs) in vitro or in vivo; or (viii) enhanced or increased ability to induce or promote Treg expansion, activity, survival and/or proliferation.

[0419] In an embodiment, the IL-2 variant comprises, or consists of, an amino acid sequence chosen from: SEQ ID NO: 2, SEQ ID NO: 3, SEQ ID NO: 4, SEQ ID NO: 5, SEQ ID NO: 6, SEQ ID NO: 7, SEQ ID NO: 8, SEQ ID NO: 9, SEQ ID NO: 10, SEQ ID NO: 11, SEQ ID NO: 12, SEQ ID NO: 13, SEQ ID NO: 14, SEQ ID NO: 15, SEQ ID NO: 16, SEQ ID NO: 17, SEQ ID NO: 18, SEQ ID NO: 19, SEQ ID NO: 20, SEQ ID NO: 21, SEQ ID NO: 22, SEQ ID NO: 23, SEQ ID NO: 24, SEQ ID NO: 25, SEQ ID NO: 26, SEQ ID NO: 27, SEQ ID NO: 28, SEQ ID NO: 29, SEQ ID NO: 30, SEQ ID NO: 31, SEQ ID NO: 32, SEQ ID NO: 33, SEQ ID NO: 34, SEQ ID NO: 35, SEQ ID NO: 36, SEQ ID NO: 37, SEQ ID NO: 38, SEQ ID NO: 1000, SEQ ID NO: 1001, SEQ ID NO: 1002, or an amino acid sequence with at least 80%, 85%, 90%, 91%, 92%, 93%, 94%, 95%, 96%, 97%, 98%, 99%, or more sequence identity thereof, or differing by no more than 1, 2, 3, 4, 5, 6, 7, 8, 9, 10, 11, 12, 13, 14, 15, 20, 25, or 30 amino acids thereto.

[0420] In an embodiment, the IL-2 variant comprises, or consists of, the amino acid sequence of SEQ ID NO: 4, or an amino acid sequence with at least 80%, 85%, 90%, 91%, 92%, 93%, 94%, 95%, 96%, 97%, 98%, 99%, or more sequence identity thereof, or differing by no more than 1, 2, 3, 4, 5, 6, 7, 8, 9, 10, 11, 12, 13, 14, 15, 20, 25, or 30 amino acids thereto. In an embodiment, the IL-2 variant comprises, or consists of, the amino acid sequence of SEQ ID NO: 5, or an amino acid sequence with at least 80%, 85%, 90%, 91%, 92%, 93%, 94%, 95%, 96%, 97%, 98%, 99%, or more sequence identity thereof, or differing by no more than 1, 2, 3, 4, 5, 6, 7, 8, 9, 10, 11, 12, 13, 14, 15, 20, 25, or 30 amino acids thereto. In an embodiment, the IL-2 variant comprises, or consists of, the amino acid sequence of SEQ ID NO: 11, or an amino acid sequence with at least 80%, 85%, 90%, 91%, 92%, 93%, 94%, 95%, 96%, 97%, 98%, 99%, or more sequence identity thereof, or differing by no more than 1, 2, 3, 4, 5, 6, 7, 8, 9, 10, 11, 12, 13, 14, 15, 20, 25, or 30 amino acids thereto. In an embodiment, the IL-2 variant comprises, or consists of, the amino acid sequence of SEQ ID NO: 1000, or an amino acid sequence with at least 80%, 85%, 90%, 91%, 92%, 93%, 94%, 95%, 96%, 97%, 98%, 99%, or more sequence identity thereof, or differing by no more than 1, 2, 3, 4, 5, 6, 7, 8, 9, 10, 11, 12, 13, 14, 15, 20, 25, or 30 amino acids thereto. In an embodiment, the IL-2 variant comprises, or consists of, the amino acid sequence of SEQ ID NO: 1001, or an amino acid sequence with at least 80%, 85%, 90%, 91%, 92%, 93%, 94%, 95%, 96%, 97%, 98%, 99%, or more sequence identity thereof, or differing by no more than 1, 2, 3, 4, 5, 6, 7, 8, 9, 10, 11, 12, 13, 14, 15, 20, 25, or 30 amino acids thereto. In an embodiment, the IL-2 variant comprises, or consists of, the amino acid sequence of SEQ ID NO: 1002, or an amino acid sequence with at least 80%, 85%, 90%, 91%, 92%, 93%, 94%, 95%, 96%, 97%, 98%, 99%, or more sequence identity thereof, or differing by no more than 1, 2, 3, 4, 5, 6, 7, 8, 9, 10, 11, 12, 13, 14, 15, 20, 25, or 30 amino acids thereto.

[0421] In an embodiment, the IL-2 variant comprises, or consists of, the amino acid sequence of any of SEQ ID NOs: 4, 5, 11, 1000, 1001, or 1002, or a functional fragment thereof. In an embodiment, the IL-2 variant comprises, or consists of, the amino acid sequence of SEQ ID NO: 4 or 5, or a functional fragment thereof. In an embodiment, the IL-2 variant comprises, or consists of, the amino acid sequence of SEQ ID NO: 4, or a functional fragment thereof. In an embodiment, the IL-2 variant comprises, or consists of, the amino acid sequence of SEQ ID NO: 5, or a functional fragment thereof. In an embodiment, the IL-2 variant comprises, or consists of, the amino acid sequence of SEQ ID NO: 11, or a functional fragment thereof. In an embodiment, the IL-2 variant comprises, or consists of, the amino acid sequence of SEQ ID NO: 1000, or a functional fragment thereof. In an embodiment, the IL-2 variant comprises, or consists of, the amino acid sequence of SEQ ID NO: 1001, or a functional fragment thereof. In an embodiment, the IL-2 variant comprises, or consists of, the amino acid sequence of SEQ ID NO: 1002, or a functional fragment thereof.

[0422] Without wishing to be bound by theory, it is believed that in an embodiment, an IL-2 variant comprising, or consisting of, the amino acid sequence of SEQ ID NO: 5, or a functional fragment thereof, can have at least one or more of the following advantageous properties: (i) has reduced binding affinity for CD122 and/or CD132, which increases the potency and selectivity of the IL-2 agent for regulatory T cells (Treg) compared to other T cell types; (ii) is significantly stable, e.g., due to the presence of stabilizing V69A and Q74P mutations; (iii) has reduced or decreased binding capacity and/or binding affinity for CD25, which improves the lifetime of the IL-2 agent; (iv) does not substantially promote expansion, activation, survival, and/or proliferation of T effector cells and/or natural killer (NK) cells in vitro and/or in vivo; and/or (v) has reduced incorrect disulfide pairing and improved stability, e.g., due to the presence of the C125S mutation. In an embodiment, an IL-2 agent comprising the H16L mutation has reduced binding affinity for CD122 and/or CD132 and/or increased potency and selectivity for Treg over other T cell types, compared to an IL-2 agent comprising other H16 mutations. These properties make an IL-2 variant comprising, or consisting of, the amino acid sequence of SEQ ID NO: 5 particularly suitable for treating disorders and conditions arising from abnormal immune responses, such as autoimmune diseases.

[0423] Thus, in an embodiment, an IL-2 variant comprising, or consisting of, the amino acid sequence SEQ ID NO: 5, or a functional fragment thereof, or an amino acid sequence with at least 80%, 85%, 90%, 91%, 92%, 93%, 94%, 95%, 96%, 97%, 98%, 99%, or more sequence identity thereof, or differing by no more than 1, 2, 3, 4, 5, 6, 7, 8, 9, 10, 11, 12, 13, 14, 15, 20, 25, or 30 amino acids thereto, has inter alia one or more (e.g., 2, 3, 4, 5, 6, 7, or all) of the following properties relative to a wild-type IL-2 or a reference IL-2 variant that does not comprise the amino acid substitutions: (i) enhanced or increased stability in vitro or in vivo; (ii) reduced or decreased binding capacity and/or binding affinity for human CD122 in vitro and/or in vivo; (iii) reduced or decreased binding capacity and/or binding affinity for human CD132 in vitro and/or in vivo; (iv) reduced or decreased affinity of the IL-2 variant for the heterodimeric IL-2 receptor composed of human CD122 and human CD132 (i.e. human CD122/CD132 heterodimer) in vitro and/or in vivo; (v) reduced or decreased or substantially unchanged binding capacity and/or binding affinity for human CD25 in vitro and/or in vivo; (vi) selective binding to regulatory T cells (e.g. Foxp3+ T cells); (vii) selective activation of the IL-2 signaling pathway in T regulatory cells (Tregs) in vitro or in vivo; or (viii) enhanced or increased ability to induce or promote Treg expansion, activity, survival and/or proliferation.

[0424] As described further herein, the disclosure provides IL-2 fusion proteins, IL-2 complexes, and IL-2 conjugates comprising an IL-2 variant described herein. In an embodiment, one or more different and/or improved properties ascribed to an IL-2 variant described herein is maintained, transferred, or imparted to the IL-2 fusion protein, IL-2 complex, or IL-2. For the purposes of the present disclosure, the terms “IL-2 variant” and “IL-2 mutein” may be used interchangeably herein.

[0425] In an embodiment, the IL-2 variant comprises a polypeptide (sometime referred to herein as “IL-2 variant polypeptide”). This disclosure provides an isolated nucleic acid molecule encoding an IL-2 variant described herein, and vectors and host cells thereof. The nucleic acid molecule includes, but is not limited to, RNA, genomic DNA and cDNA.

### IL-2 Fusion Proteins

[0426] In an embodiment, the IL-2 agent comprises an IL-2 fusion protein, e.g., an IL-2 fusion protein described herein.

[0427] In an embodiment, the IL-2 fusion protein comprises an IL-2 variant, e.g., an IL-2 variant described herein. In an embodiment, the IL-2 fusion protein comprises one or more amino acid alterations (e.g., substitutions) described in Table 9. In an embodiment, the IL-2 fusion protein comprises an amino acid sequence described in Table 9, or a functional fragment thereof. In an embodiment, the IL-2 variant is encoded by a nucleic acid comprising a nucleotide sequence described herein, e.g., in Table 10.

[0428] Without wishing to be bound by theory, it is believed that in an embodiment, the IL-2 fusion proteins described herein, which have reduced human CD25 and/or reduced human CD122/CD132 binding affinity relative to a IL-2 fusion protein comprising a wild-type human IL-2 or a reference IL-2 fusion protein, can have improved potency and/or selectivity for binding to and activating regulatory T cells (Tregs) than IL-2 fusion proteins comprising a wild-type human IL-2 or other IL-2 fusion protein.

[0429] In an embodiment, the IL-2 fusion protein has one or more (e.g., 2, 3, 4, 5, 6, 7, 8, 9, 10, 11, 12, or more) properties described herein, e.g., different and/or improved properties, relative to an IL-2 fusion protein comprising a wild-type IL-2 or a reference IL-2 fusion protein. In an embodiment, the IL-2 fusion protein comprises one or more (e.g., 2, 3, 4, 5, 6, 7, 8, 9, 10, or more) amino acid alterations (e.g., substitutions) that provide different and/or improved properties, relative to an IL-2 fusion protein comprising a wild-type IL-2 or a reference IL-2 fusion protein. In an embodiment, the IL-2 fusion protein has one or more (e.g., 2, 3, 4, 5, 6, 7, 8, 9, 10, 11, 12, or all) of the following different and/or improved properties (e.g., as determined by an assay described herein), relative to an IL-2 fusion protein comprising a wild-type IL-2 or a reference IL-2 fusion protein:

[0430] i) altered (e.g., enhanced or increased) expression in vitro and/or in vivo;

[0431] ii) altered (e.g., reduced or decreased) aggregation in vitro and/or in vivo;

[0432] iii) altered (e.g., enhanced or increased) stability in vitro and/or in vivo;

[0433] iv) altered (e.g., enhanced or increased) half-life in vitro and/or in vivo;

[0434] v) altered (e.g., reduced or decreased) turnover and/or clearance in vivo;

[0435] vi) altered (e.g., reduced or decreased) susceptibility to proteolysis in vitro and/or in vivo;

[0436] vii) altered (e.g., enhanced or increased) resistance to proteolysis in vitro and/or in vivo;

[0437] viii) altered (e.g., reduced or decreased) binding capacity and/or binding affinity for human CD25 in vitro and/or in vivo;

[0438] ix) altered (e.g., reduced or decreased) binding capacity and/or binding affinity for human CD132 in vitro and/or in vivo;

[0439] x) altered (e.g., reduced or decreased) binding capacity and/or binding affinity for the dimeric IL-2 receptor comprising human CD122 and human CD132 in vitro and/or in vivo;

[0440] xi) altered (e.g., enhanced, increased, reduced, decreased, and/or selective) binding to Tregs in vitro and/or in vivo;

[0441] xii) altered (e.g., enhanced, increased, reduced, decreased, and/or selective) activation of the IL-2 signaling pathway in Tregs in vitro and/or in vivo; or

[0442] xiii) altered (e.g., enhanced, increased, reduced, decreased, and/or selective) ability to induce or promote Treg expansion, activity, survival, and/or proliferation in vitro and/or in vivo.

[0443] In an embodiment, the IL-2 fusion protein has altered (e.g., enhanced or increased) expression in vitro and/or in vivo, relative to an IL-2 fusion protein comprising a wild-type IL-2 or a reference IL-2 fusion protein. In an embodiment, the IL-2 fusion protein has enhanced or increased expression (e.g., in a bacterial or mammalian cell) relative to an IL-2 fusion protein comprising a wild-type IL-2. In an embodiment, the IL-2 fusion protein has enhanced or increased expression (e.g., in bacterial or mammalian cell) relative to a reference IL-2 fusion protein. In an embodiment, the expression of the IL-2 fusion protein is increased by about 1%, 5%, 10%, 20%, 30%, 40%, 50%, 60%, 70%, 80%, 90%, 95%, or about 100%, or more. In an embodiment, the expression of the IL-2 fusion protein is increased by about 0.5-fold, 1-fold, 2-fold, 3-fold, 4-fold, 5-fold, 6-fold, 7-fold, 8-fold, 9-fold, or about 10-fold, or more. In an embodiment, the IL-2 fusion protein expresses at a higher or increased level in vitro and/or in vivo, e.g., increased by about 1%, about 2%, about 3%, about 4%, about 5%, about 10%, about 15%, about 20%, about 25%, about 30%, about 35%, about 40%, about 45%, about 50%, about 55%, about 60%, about 65%, about 70%, about 75%, about 80%, about 85%, about 90%, about 95%, about 100% or more e.g., relative to an IL-2 fusion protein comprising a wild-type IL-2 or a reference IL-2 fusion protein e.g., as determined by an assay of protein concentration. In an embodiment, the IL-2 fusion protein expresses at a higher or increased level, e.g., increased by about 0.5-fold, about 1-fold, about 1.5-fold, about 2-fold, about 2.5-fold, about 3-fold, about 3.5-fold, about 4-fold, about 4.5-fold, about 5-fold, about 5.5-fold, about 6-fold, about 6.5-fold, about 7-fold, about 7.5-fold, about 8-fold, about 8.5-fold, about 9-fold, about 9.5-fold, about 10-fold or more e.g., relative to an IL-2 fusion protein comprising a wild-type IL-2 or a reference IL-2 fusion protein e.g., as determined by an assay of protein concentration.

[0444] In an embodiment, the IL-2 fusion protein has altered (e.g., reduced or decreased) aggregation in vitro and/or in vivo, relative to an IL-2 fusion protein comprising a wild-type IL-2 or a reference IL-2 fusion protein. In an embodiment, the IL-2 fusion protein has reduced or decreased aggregation relative to a wild type IL-2. In an embodiment, the IL-2 fusion protein has reduced or decreased aggregation relative to a reference IL-2 fusion protein. In an embodiment, the aggregation of the IL-2 fusion protein is decreased by about 1%, 5%, 10%, 20%, 30%, 40%, 50%, 60%, 70%, 80%, 90%, 95%, or about 100%, or more. In an embodiment, the aggregation of the IL-2 fusion protein is decreased by about 0.5-fold, 1-fold, 2-fold, 3-fold, 4-fold, 5-fold, 6-fold, 7-fold, 8-fold, 9-fold, or about 10-fold, or more. In an embodiment, the IL-2 fusion protein aggregates at lower or decreased level in vitro and/or in vivo, e.g., decreased by about 1%, about 2%, about 3%, about 4%, about 5%, about 10%, about 15%, about 20%, about 25%, about 30%, about 35%, about 40%, about 45%, about 50%, about 55%, about 60%, about 65%, about 70%, about 75%, about 80%, about 85%, about 90%, about 95%, about 100% or more e.g., relative to an IL-2 fusion protein comprising a wild-type IL-2 or a reference IL-2 fusion protein e.g., as determined by melting temperature analysis (e.g., using fluorimetry), dynamic light scattering, and/or size-exclusion chromatography. In an embodiment, the IL-2 fusion protein aggregates at lower or decreased level, e.g., decreased by about 0.5-fold, about 1-fold, about 1.5-fold, about 2-fold, about 2.5-fold, about 3-fold, about 3.5-fold, about 4-fold, about 4.5-fold, about 5-fold, about 5.5-fold, about 6-fold, about 6.5-fold, about 7-fold, about 7.5-fold, about 8-fold, about 8.5-fold, about 9-fold, about 9.5-fold, about 10-fold or more e.g., relative to an IL-2 fusion protein comprising a wild-type IL-2 or a reference IL-2 fusion protein e.g., as determined by melting temperature analysis (e.g., using fluorimetry), dynamic light scattering, and/or size-exclusion chromatography.

[0445] In an embodiment, the IL-2 fusion protein has altered (e.g., enhanced or increased) stability in vitro and/or in vivo, relative to an IL-2 fusion protein comprising a wild-type IL-2 or a reference IL-2 fusion protein. In an embodiment, the IL-2 fusion protein has enhanced or increased stability relative to an IL-2 fusion protein comprising a wild-type IL-2. In an embodiment, the IL-2 fusion protein has enhanced or increased stability relative to a reference IL-2 fusion protein. In an embodiment, the stability of the IL-2 fusion protein is increased by about 1%, 5%, 10%, 20%, 30%, 40%, 50%, 60%, 70%, 80%, 90%, 95%, or about 100%, or more. In an embodiment, the stability of the IL-2 fusion protein is increased by about 0.5-fold, 1-fold, 2-fold, 3-fold, 4-fold, 5-fold, 6-fold, 7-fold, 8-fold, 9-fold, or about 10-fold, or more. In an embodiment, the IL-2 fusion protein has enhanced or increased stability in vitro and/or in vivo, e.g., increased by about 1%, about 2%, about 3%, about 4%, about 5%, about 10%, about 15%, about 20%, about 25%, about 30%, about 35%, about 40%, about 45%, about 50%, about 55%, about 60%, about 65%, about 70%, about 75%, about 80%, about 85%, about 90%, about 95%, about 100% or more, or e.g., increased by about 0.5-fold, about 1-fold, about 1.5-fold, about 2-fold, about 2.5-fold, about 3-fold, about 3.5-fold, about 4-fold, about 4.5-fold, about 5-fold, about 5.5-fold, about 6-fold, about 6.5-fold, about 7-fold, about 7.5-fold, about 8-fold, about 8.5-fold, about 9-fold, about 9.5-fold, about 10-fold or more e.g., relative to an IL-2 fusion protein comprising a wild-type IL-2 or a reference IL-2 fusion protein, e.g., as determined by yeast surface display, circular dichroism or related spectroscopic techniques, and/or melting temperature analysis (e.g., using fluorimetry).

[0446] In an embodiment, the IL-2 fusion protein has altered (e.g., enhanced or increased) half-life in vitro and/or in vivo, relative to an IL-2 fusion protein comprising a wild-type IL-2 or a reference IL-2 fusion protein. In an embodiment, the IL-2 fusion protein has enhanced or increased half-life relative to an IL-2 fusion protein comprising a wild-type IL-2. In an embodiment, the IL-2 fusion protein has enhanced or increased half-life relative to a reference IL-2 fusion protein. In an embodiment, the half-life of the IL-2 fusion protein is increased by about 1%, 5%, 10%, 20%, 30%, 40%, 50%, 60%, 70%, 80%, 90%, 95%, or about 100%, or more. In an embodiment, the half-life of the IL-2 fusion protein is increased by about 0.5-fold, 1-fold, 2-fold, 3-fold, 4-fold, 5-fold, 6-fold, 7-fold, 8-fold, 9-fold, or about 10-fold, or more. In an embodiment, the IL-2 fusion protein has enhanced or increased half-life in vitro and/or in vivo, e.g., increased by about 1%, about 2%, about 3%, about 4%, about 5%, about 10%, about 15%, about 20%, about 25%, about 30%, about 35%, about 40%, about 45%, about 50%, about 55%, about 60%, about 65%, about 70%, about 75%, about 80%, about 85%, about 90%, about 95%, about 100% or more, or e.g., greater than about 0.5-fold, about 1-fold, about 1.5-fold, about 2-fold, about 2.5-fold, about 3-fold, about 3.5-fold, about 4-fold, about 4.5-fold, about 5-fold, about 5.5-fold, about 6-fold, about 6.5-fold, about 7-fold, about 7.5-fold, about 8-fold, about 8.5-fold, about 9-fold, about 9.5-fold, about 10-fold or more e.g., relative to an IL-2 fusion protein comprising a wild-type IL-2 or a reference IL-2 fusion protein, e.g., as determined by ELISA, flow cytometry, and/or mass spectrometry.

[0447] In an embodiment, the IL-2 fusion protein has altered (e.g., reduced or decreased) turnover in vitro and/or in vivo, relative to an IL-2 fusion protein comprising a wild-type IL-2 or a reference IL-2 fusion protein. In an embodiment, the IL-2 fusion protein has reduced or decreased turnover relative to an IL-2 fusion protein comprising a wild-type IL-2. In an embodiment, the IL-2 fusion protein has reduced or decreased turnover relative to a reference IL-2 fusion protein. In an embodiment, the turnover of the IL-2 fusion protein is decreased by about 1%, 5%, 10%, 20%, 30%, 40%, 50%, 60%, 70%, 80%, 90%, 95%, or about 100%, or more. In an embodiment, the turnover of the IL-2 fusion protein is decreased by about 0.5-fold, 1-fold, 2-fold, 3-fold, 4-fold, 5-fold, 6-fold, 7-fold, 8-fold, 9-fold, about 10-fold, or more. In an embodiment, the IL-2 fusion protein has a lower, reduced or decreased rate or level of turnover and/or clearance in vivo, e.g., decreased by about 1%, about 2%, about 3%, about 4%, about 5%, about 10%, about 15%, about 20%, about 25%, about 30%, about 35%, about 40%, about 45%, about 50%, about 55%, about 60%, about 65%, about 70%, about 75%, about 80%, about 85%, about 90%, about 95%, about 100% or more, or e.g., decreased by about 0.5-fold, about 1-fold, about 1.5-fold, about 2-fold, about 2.5-fold, about 3-fold, about 3.5-fold, about 4-fold, about 4.5-fold, about 5-fold, about 5.5-fold, about 6-fold, about 6.5-fold, about 7-fold, about 7.5-fold, about 8-fold, about 8.5-fold, about 9-fold, about 9.5-fold, about 10-fold or more e.g., relative to an IL-2 fusion protein comprising a wild-type IL-2 or a reference IL-2 fusion protein, e.g., as determined by ELISA, flow cytometry, and/or mass spectrometry.

[0448] In an embodiment, the IL-2 fusion protein provided by the disclosure comprise the property of having altered (e.g., reduced or decreased) susceptibility to proteolysis in vitro and/or in vivo, relative to an IL-2 fusion protein comprising a wild-type IL-2 or a reference IL-2 fusion protein. In an embodiment, the IL-2 fusion protein has reduced or decreased susceptibility to proteolysis relative to IL-2 (e.g., wild type human IL-2). In an embodiment, the IL-2 fusion protein has reduced or decreased susceptibility to proteolysis relative to a reference IL-2 fusion protein. In an embodiment, the susceptibility to proteolysis of the IL-2 fusion protein is decreased by about 1%, 5%, 10%, 20%, 30%, 40%, 50%, 60%, 70%, 80%, 90%, 95%, or about 100%, or more. In an embodiment, the susceptibility to proteolysis of the IL-2 fusion protein is decreased by about 0.5-fold, 1-fold, 2-fold, 3-fold, 4-fold, 5-fold, 6-fold, 7-fold, 8-fold, 9-fold, or about 10-fold, or more.

[0449] In an embodiment, the IL-2 fusion protein has altered (e.g., enhanced or increased) resistance to proteolysis in vitro and/or in vivo, relative to an IL-2 fusion protein comprising a wild-type IL-2 or a reference IL-2 fusion protein. In an embodiment, the IL-2 fusion protein has enhanced or increased resistance to proteolysis relative to an IL-2 fusion protein comprising a wild-type IL-2. In an embodiment, the IL-2 fusion protein has enhanced or increased resistance to proteolysis relative to a reference IL-2 fusion protein. In an embodiment, the resistance to proteolysis of the IL-2 fusion protein is increased by about 1%, 5%, 10%, 20%, 30%, 40%, 50%, 60%, 70%, 80%, 90%, 95%, or about 100%, or more. In an embodiment, the resistance to proteolysis of the IL-2 fusion protein is increased by about 0.5-fold, 1-fold, 2-fold, 3-fold, 4-fold, 5-fold, 6-fold, 7-fold, 8-fold, 9-fold, or about 10-fold, or more.

[0450] In an embodiment, the IL-2 fusion protein has altered (e.g., reduced or decreased) binding capacity and/or binding affinity for human CD25 in vitro and/or in vivo, relative to an IL-2 fusion protein comprising a wild-type IL-2 or a reference IL-2 fusion protein. In an embodiment, the IL-2 fusion protein has reduced or decreased binding capacity and/or binding affinity for human CD25 relative to a wild-type human IL-2). In an embodiment, the IL-2 fusion protein has reduced or decreased binding capacity and/or binding affinity for human CD25 relative to a reference IL-2 fusion protein. In an embodiment, the binding capacity and/or binding affinity of the IL-2 fusion protein for human CD25 is decreased by about 1%, 5%, 10%, 20%, 30%, 40%, 50%, 60%, 70%, 80%, 90%, 95%, or about 100%, or more. In an embodiment, the binding capacity and/or binding affinity of the IL-2 fusion protein for human CD25 is decreased by about 0.5-fold, 1-fold, 2-fold, 3-fold, 4-fold, 5-fold, 6-fold, 7-fold, 8-fold, 9-fold, or about 10-fold, or more. In an embodiment, the IL-2 fusion protein has reduced or decreased binding affinity for CD25 (e.g., human CD25), e.g., decreased by about 1%, about 2%, about 3%, about 4%, about 5%, about 10%, about 15%, about 20%, about 25%, about 30%, about 35%, about 40%, about 45%, about 50%, about 55%, about 60%, about 65%, about 70%, about 75%, about 80%, about 85%, about 90%, about 95%, about 100% or more, or e.g., decreased by about 0.5-fold, about 1-fold, about 1.5-fold, about 2-fold, about 2.5-fold, about 3-fold, about 3.5-fold, about 4-fold, about 4.5-fold, about 5-fold, about 5.5-fold, about 6-fold, about 6.5-fold, about 7-fold, about 7.5-fold, about 8-fold, about 8.5-fold, about 9-fold, about 9.5-fold, about 10-fold or more e.g., relative to an IL-2 fusion protein comprising a wild-type IL-2 or a reference IL-2 fusion protein e.g., as determined by yeast surface display, surface plasmon resonance (e.g. Biacore) and/or bio-layer interferometry (e.g. Octet binding).

[0451] In an embodiment, the IL-2 fusion protein binds to CD25 (e.g., human CD25) with low affinity, e.g., with a dissociation constant (K_{D}) of about 5-500 pM, e.g., about 5, about 10, about 15, about 20, about 25, about 30, about 35, about 40, about 45, about 50, about 55, about 60, about 65, about 70, about 75, about 80, about 85, about 90, about 95, about 100, about 105, about 110, about 115, about 120, about 125, about 130, about 135, about 140, about 145, about 150, about 200, about 250, about 300, about 350, about 400, about 450, or about 500 pM, or e.g., about 10 to about 400 pM, about 20 to about 300 pM, about 50 to about 200 pM, about 100 to about 150 pM, about 5 to about 10 pM, about 10 to about 20 pM, about 20 to about 30 pM, or about 30 to about 40 pM, e.g., about 40 to about 50 pM, about 50 to about 60 pM, about 60 to about 70 pM, about 70 to about 80 pM, about 80 to about 90 pM, about 90 to about 100 pM, about 100 to about 110 pM, about 110 to about 120 pM, about 120 to about 130 pM, about 130 to about 140 pM about 140 to about 150 pM, about 150 to about 200 pM, about 200 to about 250 pM, about 250 to about 300 pM, about 300 to about 350 pM, about 350 to about 400 pM, about 400 to about 500 pM, or e.g., greater than about 5, about 10, about 15, about 20, about 25, about 30, about 35, about 40, about 45, about 50, about 55, about 60, about 65, about 70, about 75, about 80, about 85, about 90, about 95, about 100, about 105, about 110, about 115, about 120, about 125, about 130, about 135, about 140, about 145, about 150, about 200, about 250, about 300, about 350, about 400, about 450, or about 500 pM, e.g. as determined by yeast surface display, surface plasmon resonance (e.g. Biacore) and/or biolayer interferometry (e.g. Octet binding).

[0452] In an embodiment, the IL-2 fusion protein binds to CD25 (e.g., human CD25) with low affinity, e.g., with a dissociation constant (K_{D}) of about 0.1-10 nM, e.g., about 0.1, about 0.2, about 0.3, about 0.4, about 0.5, about 0.6, about 0.7, about 0.8, about 0.9, about 1, about 1.5, about 2, about 2.5, about 3, about 3.5, about 4, about 4.5, about 5, about 6, about 7, about 8, about 9, or about 10 nM, or e.g., about 0.2 to about 5 nM, about 0.5 to about 2 nM, about 1 to 1.5 nM, about 0.1 to about 0.2 nM, about 0.2 to about 0.3 nM, about 0.3 to about 0.4 nM, or about 0.4 to about 0.5 nM, e.g., about 0.5 to about 0.6 nM, about 0.6 to about 0.7 nM, about 0.7 to about 0.8 nM, about 0.8 to about 0.9 nM, about 0.9 to about 1 nM, about 1 to about 1.5 nM, about 1.5 to about 2 nM, about 2.5 to about 3 nM, about 3.5 to about 4 nM, about 4 to about 4.5 nM, about 4.5 to about 5 nM, about 5 to about 6 nM, about 6 to about 7 nM, about 7 to about 8 nM, about 8 to about 9 nM, or about 9 to about 10 nM, or e.g., greater than about 0.1, about 0.2. about 0.3, about 0.4, about 0.5, about 0.6, about 0.7, about 0.8, about 0.9, about 1, about 2, about 3, about 4, about 5, about 6, about 7, about 8, about 9, or about 10 nM, e.g., as determined by surface plasmon resonance (e.g. Biacore) and/or bio-layer interferometry (e.g., Octet binding).

[0453] In an embodiment, the IL-2 fusion protein has altered (e.g., reduced or decreased) binding capacity and/or binding affinity for human CD132 in vitro and/or in vivo, relative to an IL-2 fusion protein comprising a wild-type IL-2 or a reference IL-2 fusion protein. In an embodiment, the IL-2 fusion protein has reduced or decreased binding capacity and/or binding affinity for human CD132 relative to an IL-2 fusion protein comprising a wild-type IL-2. In an embodiment, the IL-2 fusion protein has reduced or decreased binding capacity and/or binding affinity for human CD132 relative to a reference IL-2 fusion protein. In an embodiment, the binding capacity and/or binding affinity of the IL-2 fusion protein for human CD132 is decreased by about 1%, 5%, 10%, 20%, 30%, 40%, 50%, 60%, 70%, 80%, 90%, 95%, or about 100%, or more. In an embodiment, the binding capacity and/or binding affinity of the IL-2 fusion protein for human CD132 is decreased by about 0.5-fold, 1-fold, 2-fold, 3-fold, 4-fold, 5-fold, 6-fold, 7-fold, 8-fold, 9-fold, or about 10-fold, or more.

[0454] In an embodiment, the IL-2 fusion protein has altered (e.g., reduced or decreased) binding capacity and/or binding affinity for the human dimeric IL-2 receptor comprising human CD122 and human CD132 in vitro and/or in vivo, relative to an IL-2 fusion protein comprising a wild-type IL-2 or a reference IL-2 fusion protein. In an embodiment, the IL-2 fusion protein has reduced or decreased binding capacity and/or binding affinity for the human dimeric IL-2 receptor comprising human CD122 and human CD132 relative to an IL-2 fusion protein comprising a wild-type IL-2. In an embodiment, the IL-2 fusion protein has reduced or decreased binding capacity and/or binding affinity for the human dimeric IL-2 receptor comprising human CD122 and human CD132 relative to a reference IL-2 fusion protein. In an embodiment, the binding capacity and/or binding affinity of the IL-2 fusion protein for the human dimeric IL-2 receptor comprising human CD122 and human CD132 is decreased by about 1%, 5%, 10%, 20%, 30%, 40%, 50%, 60%, 70%, 80%, 90%, 95%, or about 100%, or more. In an embodiment, the binding capacity and/or binding affinity of the IL-2 fusion protein for the human dimeric IL-2 receptor comprising human CD122 and human CD132 is decreased by about 0.5-fold, 1-fold, 2-fold, 3-fold, 4-fold, 5-fold, 6-fold, 7-fold, 8-fold, 9-fold, or about 10-fold, or more.

[0455] In an embodiment, the IL-2 fusion protein has altered (e.g., enhanced, increased, and/or selective) binding to Tregs in vitro and/or in vivo, relative to an IL-2 fusion protein comprising a wild-type IL-2 or a reference IL-2 fusion protein. In an embodiment, the IL-2 fusion protein has enhanced or increased binding to Tregs relative to an IL-2 fusion protein comprising a wild-type IL-2. In an embodiment, the IL-2 fusion protein has selective binding to Tregs relative to IL-2 (e.g., wild type human IL-2). In an embodiment, the IL-2 fusion protein has enhanced or increased binding to Tregs relative to a reference IL-2 fusion protein. In an embodiment, the IL-2 fusion protein has selective binding to Tregs relative to a reference IL-2 fusion protein. In an embodiment, the binding to Tregs is increased by about 1%, 5%, 10%, 20%, 30%, 40%, 50%, 60%, 70%, 80%, 90%, 95%, or about 100%, or more. In an embodiment, the binding to Tregs is increased by about 0.5-fold, 1-fold, 2-fold, 3-fold, 4-fold, 5-fold, 6-fold, 7-fold, 8-fold, 9-fold, or about 10-fold, or more.

[0456] In an embodiment, the IL-2 fusion protein has reduced or decreased binding affinity for CD122/CD132 heterodimer (e.g., human CD122/CD132 heterodimer), e.g., decreased by about 1%, about 2%, about 3%, about 4%, about 5%, about 10%, about 15%, about 20%, about 25%, about 30%, about 35%, about 40%, about 45%, about 50%, about 55%, about 60%, about 65%, about 70%, about 75%, about 80%, about 85%, about 90%, about 95%, about 100% or more, or e.g., decreased by about 0.5-fold, about 1-fold, about 1.5-fold, about 2-fold, about 2.5-fold, about 3-fold, about 3.5-fold, about 4-fold, about 4.5-fold, about 5-fold, about 5.5-fold, about 6-fold, about 6.5-fold, about 7-fold, about 7.5-fold, about 8-fold, about 8.5-fold, about 9-fold, about 9.5-fold, about 10-fold or more e.g., relative to an IL-2 fusion protein comprising a wild-type IL-2 or a reference IL-2 fusion protein e.g., as determined by yeast surface display, surface plasmon resonance (e.g. Biacore) and/or bio-layer interferometry (e.g. Octet binding).

[0457] In an embodiment, the IL-2 fusion protein binds to CD122/CD132 heterodimer (e.g., human CD122/CD132 heterodimer) with low affinity, e.g., with a dissociation constant (K_{D}) of about 0.2-20 nM, e.g., about 0.2, about 0.3, about 0.4, about 0.5, about 0.6, about 0.7, about 0.8, about 0.9, about 1, about 1.1, about 1.2, about 1.3, about 1.4. about 1.5, about 2, about 3, about 4, about 5, about 6, about 7, about 8, about 9, about 10, about 11, about 12, about 13, about 14, about 15, about 16, about 17, about 18, or about 20 nM, or e.g., about 0.5 to about 15 nM, about 1 to about 10 nM, about 2 to about 5 nM, about 0.2 to about 0.3 nM, about 0.3 to about 0.4 nM, about 0.4 to about 0.5 nM, about 0.5 to about 0.6 nM, about 0.6 to about 0.7 nM, about 0.7 to about 0.8 nM, about 0.8 to about 0.9 nM, about 0.9 to about 1 nM, about 1 to about 1.1 nM, about 1.1 to about 1.2 nM, about 1.2 to about 1.3 nM, about 1.3 to about 1.4 nM, about 1.4 to about 1.5 nM, about 1.5 to about 2 nM, about 2 to about 3 nM, about 3 to about 4 nM, about 4 to about 5 nM, about 5 to about 6 nM, about 6 to about 7 nM, about 7 to about 8 nM, about 8 to about 9 nM, about 9 to about 10 nM, about 10 to about 11 nM, about 11 to about 12 nM, about 12 to about 13 nM, about 13 to about 14 nM, about 14 to about 15 nM, about 15 to about 16 nM, about 16 to about 17 nM, about 17 to about 18 nM, about 18 to about 19 nM, or about 19 to about 20 nM, or e.g., greater than about 0.2, about 0.3, about 0.4, about 0.5, about 0.6, about 0.7, about 0.8, about 0.9, about 1, about 1.1, about 1.2, about 1.3, about 1.4. about 1.5, about 2, about 3, about 4, about 5, about 6, about 7, about 8, about 9, about 10, about 11, about 12, about 13, about 14, about 15, about 16, about 17, about 18, or about 20 nM, e.g., as determined by yeast surface display.

[0458] In an embodiment, the IL-2 fusion protein binds to CD122/CD132 heterodimer (e.g., human CD122/CD132 heterodimer) with low affinity, e.g., with a dissociation constant (K_{D}) of about 0.2-300 nM, e.g., about 0.2 nM, about 0.5 nM, about 1 nM, about 2 nM, about 5 nM, about 10 nM, about 15 nM, about 20 nM, about 25 nM, about 30 nM, about 40 nM, about 50 nM, about 60 nM, about 70 nM, about 80 nM, about 90 nM, about 100 nM, about 110 nM, about 120 nM, about 130 nM, about 140 nM, about 150 nM, about 160 nM, about 170 nM, about 180 nM, about 190 nM, about 200 nM, about 210 nM, about 220 nM, about 230 nM, about 240 nM, about 250 nM, about 260 nM, about 270 nM, about 280 nM, about 290 nM, or about 300 nM, or e.g., about 0.5 to about 15 nM, about 1 to about 10 nM, about 2 to about 5 nM, about 0.2 nM to about 0.5 nM, about 0.5 nM to about 1 nM, about 1 to about 2 nM, about 2 nM to about 5 nM, about 5 nM to about 10 nM, about 10 nM to about 15 nM, about 15 nM to about 20 nM, about 20 nM to about 25 nM, about 25 to about 30 nM, about 30 nM to about 40 nM, about 40 nM to about 50 nM, about 50 to about 60 nM, about 60 to about 70 nM, about 70 nM to about 80 nM, about 80 nM to about 90 nM, about 90 nM to about 100 nM, about 100 nM to about 110 nM, about 110 nM to about 120 nM, about 120 nM to about 130 nM, about 130 nM to about 140 nM, about 140 nM to about 150 nM, about 150 nM to about 160 nM, about 160 nM to about 170 nM, about 170 nM to about 180 nM, about 180 nM to about 190 nM, about 190 nM to about 200 nM, about 200 nM to about 210 nM, about 210 nM to about 220 nM, about 220 nM to about 230 nM, about 230 nM to about 240 nM, about 240 nM to about 250 nM, about 250 nM to about 260 nM, about 260 nM to about 270 nM, about 270 nM to about 280 nM, about 280 nM to about 290 nM, or about 290 nM to about 300 nM, or e.g., greater than about 0.2, about 0.5, about 1, about 2, about 5, about 10, about 15, about 20 nM, about 25 nM, about 30 nM, about 40 nM, about 50 nM, about 60 nM, about 70 nM, about 80 nM, about 90 nM, about 100 nM, about 110 nM, about 120 nM, about 130 nM, about 140 nM, about 150 nM, about 160 nM, about 170 nM, about 180 nM, about 190 nM, about 200 nM, about 210 nM, about 220 nM, about 230 nM, about 240 nM, about 250 nM, about 260 nM, about 270 nM, about 280 nM, about 290 nM, or greater than about 300 nM, e.g., as determined by surface plasmon resonance (e.g. Biacore) and/or biolayer interferometry (e.g. Octet binding).

[0459] In an embodiment, the IL-2 fusion protein has altered (e.g., enhanced, increased, and/or selective) binding to Tregs in vitro and/or in vivo, relative to an IL-2 fusion protein comprising wild-type IL-2 or a reference IL-2 fusion protein. In an embodiment, the IL-2 fusion protein has enhanced or increased binding to Tregs relative to an IL-2 fusion protein comprising wild-type IL-2. In an embodiment, the IL-2 fusion protein has selective binding to Tregs relative to IL-2 (e.g., wild type human IL-2). In an embodiment, the IL-2 fusion protein has enhanced or increased binding to Tregs relative to a reference IL-2 fusion protein. In an embodiment, the IL-2 fusion protein has selective binding to Tregs relative to a reference IL-2 fusion protein. In an embodiment, the binding to Tregs is increased by about 1%, 5%, 10%, 20%, 30%, 40%, 50%, 60%, 70%, 80%, 90%, 95%, or about 100%, or more. In an embodiment, the binding to Tregs is increased by about 0.5-fold, 1-fold, 2-fold, 3-fold, 4-fold, 5-fold, 6-fold, 7-fold, 8-fold, 9-fold, or about 10-fold, or more.

[0460] In an embodiment, the IL-2 fusion protein has altered (e.g., enhanced, increased, and/or selective) activation of the IL-2 signaling pathway in Tregs in vitro and/or in vivo, relative to an IL-2 fusion protein comprising a wild-type IL-2 or a reference IL-2 fusion protein. In an embodiment, the IL-2 fusion protein has enhanced or increased activation of the IL-2 signaling pathway in Tregs relative to an IL-2 fusion protein comprising a wild-type IL-2. In an embodiment, the IL-2 fusion protein has selective activation of the IL-2 signaling pathway in Tregs relative to an IL-2 fusion protein comprising a wild-type IL-2. In an embodiment, the IL-2 fusion protein has enhanced or increased activation of the IL-2 signaling pathway in Tregs relative to a reference IL-2 fusion protein. In an embodiment, the IL-2 fusion protein has selective activation of the IL-2 signaling pathway in Tregs relative to a reference IL-2 fusion protein. In an embodiment, the activation of the IL-2 signaling pathway in Tregs is increased by about 1%, 5%, 10%, 20%, 30%, 40%, 50%, 60%, 70%, 80%, 90%, 95%, or about 100%, or more. In an embodiment, the activation of the IL-2 signaling pathway in Tregs is increased by about 0.5-fold, 1-fold, 2-fold, 3-fold, 4-fold, 5-fold, 6-fold, 7-fold, 8-fold, 9-fold, or about 10-fold, or more.

[0461] In an embodiment, the IL-2 fusion protein selectively activates IL-2 signaling in T regulatory cells in vitro and/or in vivo, e.g., having an T helper EC50/Treg EC50 ratio greater than about 1, about 2, about 3, about 4, about 5, 6, 7, 8, 9, 10, 11, 12, 13, 14, 15, 16, 17, 18, 19, 20, 21, 22, 23, 24, 25, 26, 27, 28, 29, 30, 35, 40, 45, 50, 55, 60, 65, 70, 75, 80, 85, 90, 95, 100, 150, 200, 250, 300, 350, 400, 450, 500, 600, 700, 800, 900, 1000, 1500, 2000, 2500, or about 3000 or more relative to an IL-2 fusion protein comprising a wild-type IL-2 or a reference IL-2 fusion protein e.g., as determined flow cytometry.

[0462] In an embodiment, the IL-2 fusion protein selectively activates IL-2 signaling in T regulatory cells in vitro and/or in vivo, e.g., having an NK cell EC50/Treg EC50 ratio greater than e.g., about 1, about 2, about 3, about 4, about 5, 6, 7, 8, 9, 10, 11, 12, 13, 14, 15, 16, 17, 18, 19, 20, 21, 22, 23, 24, 25, 26, 27, 28, 29, 30, 35, 40, 45, 50, 55, 60, 65, 70, 75, 80, 85, 90, 95, 100, 150, 200, 250, 300, 350, 400, 450, 500, 600, 700, 800, 900, 1000, 1500, 2000, 2500, or about 3000 or more, or e.g., greater than 1 and about 1 to 2, about 2 to 3, about 3 to 4, about 4 to 5, greater than 1 and about 1 to 10, greater than 1 and about 1 to 20, greater than 1 and about 1 to 30, greater than 1 and about 1 to 40, greater than 1 and about 1 to 50, about 2 to 10, about 2 to 20, about 2 to 30, about 2 to 40, 2 to 50, about 5 to 10, about 5 to 20, about 5 to 30, about 5 to 40, about 5 to 50, about 10 to 20, about 10 to 30, about 10 to 40 about 10 to 50, about 20 to 40, about 20 to 50, about 50 to 100, about 100 to 200, about 200 to 500, about 500 to 1000, about 1000 to 2000, or about 1000 to 3000, relative to an IL-2 fusion protein comprising a wild-type IL-2 or a reference IL-2 fusion protein e.g., as determined flow cytometry.

[0463] In an embodiment, the IL-2 fusion protein has altered (e.g., enhanced, increased, and/or selective) ability to induce or promote Treg expansion, activity, survival, and/or proliferation in vitro and/or in vivo, relative to an IL-2 fusion protein comprising a wild-type IL-2 or a reference IL-2 fusion protein. In an embodiment, the IL-2 fusion protein has enhanced or increased ability to induce or promote Treg expansion, activity, survival, and/or proliferation relative to an IL-2 fusion protein comprising a wild-type IL-2. In an embodiment, the IL-2 fusion protein has selective ability to induce or promote Treg expansion, activity, survival, and/or proliferation relative to an IL-2 fusion protein comprising a wild-type IL-2. In an embodiment, the IL-2 fusion protein has enhanced or increased ability to induce or promote Treg expansion, activity, survival, and/or proliferation relative to a reference IL-2 fusion protein. In an embodiment, the IL-2 fusion protein has selective ability to induce or promote Treg expansion, activity, survival, and/or proliferation relative to a reference IL-2 fusion protein. In an embodiment, the ability to induce or promote Treg expansion, activity, survival, and/or proliferation is increased by about 1%, 5%, 10%, 20%, 30%, 40%, 50%, 60%, 70%, 80%, 90%, 95%, or about 100%, or more. In an embodiment, the ability to induce or promote Treg expansion, activity, survival, and/or proliferation is increased by about 0.5-fold, 1-fold, 2-fold, 3-fold, 4-fold, 5-fold, 6-fold, 7-fold, 8-fold, 9-fold, or about 10-fold, or more.

[0464] In an embodiment, the IL-2 fusion protein has enhanced or increased potency and/or ability to induce or promote T regulatory cell activity, e.g., having an EC50 for Tregs that is lower by about 1%, about 2%, about 3%, about 4%, about 5%, about 10%, about 15%, about 20%, about 25%, about 30%, about 35%, about 40%, about 45%, about 50%, about 55%, about 60%, about 65%, about 70%, about 75%, about 80%, about 85%, about 90%, about 95%, about 100% or more, or e.g., decreased by about 0.5-fold, about 1-fold, about 1.5-fold, about 2-fold, about 2.5-fold, about 3-fold, about 3.5-fold, about 4-fold, about 4.5-fold, about 5-fold, about 5.5-fold, about 6-fold, about 6.5-fold, about 7-fold, about 7.5-fold, about 8-fold, about 8.5-fold, about 9-fold, about 9.5-fold, about 10-fold or more e.g., relative to an IL-2 fusion protein comprising a wild-type IL-2 or a reference IL-2 fusion protein e.g., as determined flow cytometry.

[0465] In an embodiment, the IL-2 fusion protein has reduced or decreased potency and/or ability to induce or promote T regulatory cell activity, e.g., having an EC50 for Tregs that is higher by about 1%, about 2%, about 3%, about 4%, about 5%, about 10%, about 15%, about 20%, about 25%, about 30%, about 35%, about 40%, about 45%, about 50%, about 55%, about 60%, about 65%, about 70%, about 75%, about 80%, about 85%, about 90%, about 95%, or about 100% or more, or e.g., decreased by about 0.5-fold, about 1-fold, about 1.5-fold, about 2-fold, about 2.5-fold, about 3-fold, about 3.5-fold, about 4-fold, about 4.5-fold, about 5-fold, about 5.5-fold, about 6-fold, about 6.5-fold, about 7-fold, about 7.5-fold, about 8-fold, about 8.5-fold, about 9-fold, about 9.5-fold, about 10-fold, about 50-fold, about 100-fold, about 200-fold, about 500-fold, about 1000-fold, about 2000-fold, about 5000-fold, about 10,000, about 15,000-fold, or about 20,000-fold or more e.g., relative to an IL-2 fusion protein comprising a wild-type IL-2 or a reference IL-2 fusion protein e.g., as determined flow cytometry.

[0466] In an embodiment, the T helper cell described herein is a CD45+CD3+CD4+Foxp3− cell, e.g., determined by flow cytometry. In an embodiment, the Treg described herein is CD45+CD3+CD4+Foxp3+ cell, e.g., determined by flow cytometry. In an embodiment, the NK cell described herein is a CD45+CD3− cell that is CD56+ and/or CD16+, e.g., determined by flow cytometry. In an embodiment, the NK cell described herein is a CD45+CD3-CD56+ cell, e.g., determined by flow cytometry.

[0467] In an embodiment, the IL-2 fusion protein has one or more of the same, or substantially the same, structural and/or functional properties, as an IL-2 fusion protein comprising a wild-type IL-2 or a reference IL-2 fusion protein.

[0468] In an embodiment, the reference IL-2 fusion protein comprises an amino acid sequence that has about 75%, 80%, 85%, 90%, 91%, 92%, 93%, 94%, 95%, 96%, 97%, 98%, 99%, or more sequence identity to an IL-2 fusion protein described herein. In an embodiment, the reference IL-2 fusion protein comprises an IL-2 variant comprising the amino acid sequence of SEQ ID NO: 57. In an embodiment, the IL-2 fusion protein comprises an amino acid sequence that is at least 80%, 85%, 90%, 95%, or 98% identical to the amino acid sequence of SEQ ID NO: 57 and comprises one or more (2, 3, 4, 5, 6, 7, 8, 9, 10, or more) amino acid alterations (e.g., substitutions) described herein.

[0469] In an embodiment, the IL-2 fusion protein comprises an IL-2 polypeptide (e.g., a human IL-2 polypeptide) described herein. In an embodiment, the IL-2 fusion protein is encoded by a nucleic acid comprising a nucleotide sequence described herein.

[0470] In an embodiment, the IL-2 fusion protein comprises an amino acid alteration (e.g., substitution) at one or more (e.g., 2, 3, 4, 5, 6, 7, 8, 9, 10, 11, 12, 13, 14, or all) of positions in IL-2, as described herein. In an embodiment, the IL-2 fusion protein comprises an amino acid alteration (e.g., substitution) at one or more (e.g., 2, 3, 4, 5, 6, 7, 8, 9, 10, 11, 12, 13, 14, or all) of positions chosen from T3, H16, 128, K35, R38, F42, E68, V69, Q74, D84, S87, N88, 192, C125, or Q126 in IL-2.

[0471] In an embodiment, the IL-2 fusion protein comprises an amino acid alteration (e.g., substitution) at position T3 in IL-2. In an embodiment, the IL-2 fusion protein comprises an amino acid alteration (e.g., substitution) at position H16 in IL-2. In an embodiment, the IL-2 fusion protein comprises an amino acid alteration (e.g., substitution) at position 128 in IL-2. In an embodiment, the IL-2 fusion protein comprises an amino acid alteration (e.g., substitution) at position K35 in IL-2. In an embodiment, the IL-2 fusion protein comprises an amino acid alteration (e.g., substitution) at position R38 in IL-2. In an embodiment, the IL-2 fusion protein comprises an amino acid alteration (e.g., substitution) at position F42 in IL-2. In an embodiment, the IL-2 fusion protein comprises an amino acid alteration (e.g., substitution) at position E68 in IL-2. In an embodiment, the IL-2 fusion protein comprises an amino acid alteration (e.g., substitution) at position V69 in IL-2. In an embodiment, the IL-2 fusion protein comprises an amino acid alteration (e.g., substitution) at position Q74 in IL-2. In an embodiment, the IL-2 fusion protein comprises an amino acid alteration (e.g., substitution) at position D84 in IL-2. In an embodiment, the IL-2 fusion protein comprises an amino acid alteration (e.g., substitution) at position S87 in IL-2. In an embodiment, the IL-2 fusion protein comprises an amino acid alteration (e.g., substitution) at position N88 in IL-2. In an embodiment, the IL-2 fusion protein comprises an amino acid alteration (e.g., substitution) at position 192 in IL-2. In an embodiment, the IL-2 fusion protein comprises an amino acid alteration (e.g., substitution) at position C125 in IL-2. In an embodiment, the IL-2 fusion protein comprises an amino acid alteration (e.g., substitution) at position Q126 in IL-2.

[0472] In an embodiment, the IL-2 fusion protein comprises an amino acid alteration (e.g., substitution) at position V69, Q74, or both, in IL-2. In an embodiment, the IL-2 fusion protein comprises an amino acid alteration (e.g., substitution) at positions V69 and Q74 in IL-2. In an embodiment, the IL-2 fusion protein comprises the amino acid substitution V69A in IL-2. In an embodiment, the IL-2 fusion protein comprises the amino acid substitution Q74P in IL-2.

[0473] In an embodiment, the IL-2 fusion protein comprises an amino acid alteration (e.g., substitution) at position H16, 192, D84, or a combination thereof, in IL-2. In an embodiment, the IL-2 fusion protein comprises an amino acid alteration (e.g., substitution) at position H16, optionally wherein the amino acid substitution is H16N, H16L, or H16D, in IL-2. In an embodiment, the IL-2 fusion protein comprises the amino acid substitution H16N in IL-2. In an embodiment, the IL-2 fusion protein comprises the amino acid substitution H16L in IL-2. In an embodiment, the IL-2 fusion protein comprises the amino acid substitution H16D in IL-2.

[0474] In an embodiment, the IL-2 fusion protein comprises an amino acid alteration (e.g., substitution) at position at 192, optionally wherein the amino acid substitution is I92S, in IL-2. In an embodiment, the IL-2 fusion protein comprises the amino acid substitution I92S in IL-2.

[0475] In an embodiment, the IL-2 fusion protein comprises an amino acid alteration (e.g., substitution) at position D84, optionally wherein the amino acid substitution is D84V, in IL-2. In an embodiment, the IL-2 fusion protein comprises the amino acid substitution is D84V in IL-2.

[0476] In an embodiment, the IL-2 fusion protein comprises an amino acid alteration (e.g., substitution) at position K35, R38, F42, E68, or a combination thereof, in IL-2. In an embodiment, the IL-2 fusion protein comprises an amino acid alteration (e.g., substitution) at position K35, optionally wherein the amino acid substitution is K35E, in IL-2. In an embodiment, IL-2 fusion protein comprises the amino acid substitution K35E in IL-2.

[0477] In an embodiment, the IL-2 fusion protein comprises an amino acid alteration (e.g., substitution) at position R38, optionally wherein the amino acid substitution is R38E, R38N or R38Q, in IL-2. In an embodiment, the IL-2 fusion protein comprises the amino acid substitution R38N in IL-2. In an embodiment, the IL-2 fusion protein comprises the amino acid substitution R38Q in IL-2.

[0478] In an embodiment, the IL-2 fusion protein comprises an amino acid alteration (e.g., substitution) at position F42, optionally wherein the amino acid substitution is F42K or F42Q, in IL-2. In an embodiment, the IL-2 fusion protein comprises the amino acid substitution F42K in IL-2. In an embodiment, the IL-2 fusion protein comprises the amino acid substitution F42Q in IL-2.

[0479] In an embodiment, the IL-2 fusion protein comprises an amino acid alteration (e.g., substitution): (i) at (a) positions V69 and Q74, (b) position K35, or (c) positions V69, Q74, and K35; and (ii) at one, two, or all of positions H16, 192, or D84, in IL-2. In an embodiment, the IL-2 fusion protein further comprises an amino acid alteration (e.g., substitution) at one, two, or all of positions R38, F42, or E68, in IL-2.

[0480] In an embodiment, the IL-2 fusion protein comprises an amino acid alteration (e.g., substitution): (i) at (a) positions V69 and Q74, (b) position K35, or (c) positions V69, Q74, and K35; and (ii) at (a) one, two, or all of positions H16, 192, or D84; or (b) one, two, or all of positions R38, F42, or E68, in IL-2.

[0481] In an embodiment, the IL-2 fusion protein comprises an amino acid alteration (e.g., substitution): (i) at (a) positions V69 and Q74, (b) position K35, or (c) positions V69, Q74, and K35; and (ii) at (a) one, two, or all of positions H16, 192, or D84; and (b) one, two, or all of positions R38, F42, or E68, in IL-2.

[0482] In an embodiment, the IL-2 fusion protein comprises an amino acid alteration (e.g., substitution) at position V69, Q74, and H16, optionally wherein the amino acid substitution is V69A, Q74P, and H16N or H16L, respectively, in IL-2. In an embodiment, the IL-2 fusion protein comprises the amino acid substitutions V69A, Q74P, and H16N or H16L, in IL-2. In an embodiment, the IL-2 fusion protein comprises the amino acid substitutions V69A, Q74P, and H16N, in IL-2. In an embodiment, the IL-2 fusion protein comprises the amino acid substitutions V69A, Q74P, and H16L, in IL-2.

[0483] In an embodiment, the IL-2 fusion protein comprises an amino acid alteration (e.g., substitution) at position V69, Q74, and 192, optionally wherein the amino acid substitution is V69A, Q74P, and I92S, respectively, in IL-2. In an embodiment, the IL-2 fusion protein comprises the amino acid substitutions V69A, Q74P, and I92S, in IL-2.

[0484] In an embodiment, the IL-2 fusion protein comprises an amino acid alteration (e.g., substitution) at position V69, Q74, and D84, optionally wherein the amino acid substitution is V69A, Q74P, and D84V, respectively, in IL-2. In an embodiment, the IL-2 fusion protein comprises the amino acid substitutions V69A, Q74P, and D84V, in IL-2.

[0485] In an embodiment, the IL-2 fusion protein comprises an amino acid alteration (e.g., substitution) at position V69, Q74, and R38, optionally wherein the amino acid substitution is V69A, Q74P, and R38Q, respectively, in IL-2. In an embodiment, the IL-2 fusion protein comprises the amino acid substitutions V69A, Q74P, and R38Q, in IL-2.

[0486] In an embodiment, the IL-2 fusion protein comprises an amino acid alteration (e.g., substitution) at position V69, Q74, and F42, optionally wherein the amino acid substitution is V69A, Q74P, and F42Q, respectively, in IL-2. In an embodiment, the IL-2 fusion protein comprises the amino acid substitutions V69A, Q74P, and F42Q, in IL-2.

[0487] In an embodiment, the IL-2 fusion protein comprises an amino acid alteration (e.g., substitution) at position V69, Q74, and R38, optionally wherein the amino acid substitution is V69A, Q74P, and R38N, respectively, in IL-2. In an embodiment, the IL-2 fusion protein comprises the amino acid substitutions V69A, Q74P, and R38N, in IL-2.

[0488] In an embodiment, the IL-2 fusion protein comprises an amino acid alteration (e.g., substitution) at position V69, Q74, and R38, optionally wherein the amino acid substitution is V69A, Q74P, and R38E, respectively, in IL-2. In an embodiment, the IL-2 fusion protein comprises the amino acid substitution V69A, Q74P, and R38E, in IL-2.

[0489] In an embodiment, the IL-2 fusion protein comprises an amino acid alteration (e.g., substitution) at position V69, Q74, K35, and H16, optionally wherein the amino acid substitution is V69A, Q74P, K35E, and H16N, respectively, in IL-2. In an embodiment, the IL-2 fusion protein comprises the amino acid substitutions V69A, Q74P, K35E, and H16N, in IL-2.

[0490] In an embodiment, the IL-2 fusion protein comprises an amino acid alteration (e.g., substitution) at position V69, Q74, K35, H16, and R38, optionally wherein the amino acid substitution is V69A, Q74P, K35E, H16N, and R38N, respectively, in IL-2. In an embodiment, the IL-2 fusion protein comprises the amino acid substitutions V69A, Q74P, K35E, H16N, and R38N, in IL-2.

[0491] In an embodiment, the IL-2 fusion protein comprises an amino acid alteration (e.g., substitution) at position V69, Q74, H16, and R38, optionally wherein the amino acid substitution is V69A, Q74P, H16N, and R38N or R38Q, respectively, in IL-2. In an embodiment, the IL-2 fusion protein comprises the amino acid substitutions V69A, Q74P, H16N, and R38N or R38Q, in IL-2. In an embodiment, the IL-2 fusion protein comprises the amino acid substitutions V69A, Q74P, H16N, and R38N, in IL-2. In an embodiment, the IL-2 fusion protein comprises the amino acid substitutions V69A, Q74P, H16N, and R38Q, in IL-2.

[0492] In an embodiment, the IL-2 fusion protein comprises an amino acid alteration (e.g., substitution) at position 128, E68, S87, N88, Q126, or a combination thereof, in IL-2.

[0493] In an embodiment, the IL-2 fusion protein comprises an amino acid alteration (e.g., substitution) at position 128, optionally wherein the amino acid substitution is I28T or I28F, in IL-2. In an embodiment, the IL-2 fusion protein comprises the amino acid substitution I28T in IL-2. In an embodiment, the IL-2 fusion protein comprises the amino acid substitution I28F in IL-2.

[0494] In an embodiment, the IL-2 fusion protein comprises an amino acid alteration (e.g., substitution) at position E68, optionally wherein the amino acid substitution is E68Q or E68N, in IL-2. In an embodiment, the IL-2 fusion protein comprises the amino acid substitution E68Q in IL-2. In an embodiment, the IL-2 fusion protein comprises the amino acid substitution E68N in IL-2.

[0495] In an embodiment, the IL-2 fusion protein comprises an amino acid alteration (e.g., substitution) at position S87, optionally wherein the amino acid substitution is S87R, in IL-2. In an embodiment, the IL-2 fusion protein comprises the amino acid substitution S87R in IL-2.

[0496] In an embodiment, the IL-2 fusion protein comprises an amino acid alteration (e.g., substitution) at position N88, optionally wherein the amino acid substitution is N88S, N88L, or N88D, in IL-2. In an embodiment, the IL-2 fusion protein comprises the amino acid substitution N88S, N88L, or N88D, in IL-2. In an embodiment, the IL-2 fusion protein comprises the amino acid substitution N88S in IL-2. In an embodiment, the IL-2 fusion protein comprises the amino acid substitution N88L in IL-2. In an embodiment, the IL-2 fusion protein comprises the amino acid substitution N88D in IL-2.

[0497] In an embodiment, the IL-2 fusion protein comprises an amino acid alteration (e.g., substitution) at position Q126, optionally wherein the amino acid substitution is Q126T, Q126K, or Q126R, in IL-2. In an embodiment, the IL-2 fusion protein comprises the amino acid substitution Q126T, Q126K, or Q126R, in IL-2. In an embodiment, the IL-2 fusion protein comprises the amino acid substitution Q126T, Q126K, or Q126R, in IL-2. In an embodiment, the IL-2 fusion protein comprises the amino acid substitution Q126T in IL-2. In an embodiment, the IL-2 fusion protein comprises the amino acid substitution Q126K in IL-2. In an embodiment, the IL-2 fusion protein comprises the amino acid substitution Q126R in IL-2.

[0498] In an embodiment, the IL-2 fusion protein comprises an amino acid alteration (e.g., substitution) at position C125 in IL-2, optionally wherein the amino acid substitution is C125S. In an embodiment, the IL-2 fusion protein comprises the amino acid substitution C125S in IL-2.

[0499] In an embodiment, the IL-2 fusion protein comprises an amino acid alteration (e.g., substitution) at position T3 in IL-2, optionally wherein the amino acid substitution is T3A. In an embodiment, the IL-2 fusion protein comprises the amino acid substitution T3A in IL-2.

[0500] In an embodiment, the IL-2 fusion protein comprises an amino acid alteration (e.g., substitution) at position V69, Q74, and C125, in IL-2, optionally wherein the amino acid substitution is V69A, Q74P, and C125S, respectively. In an embodiment, the IL-2 fusion protein comprises the amino acid substitutions V69A, Q74P, and C125S, in IL-2.

[0501] In an embodiment, the IL-2 fusion protein comprises an amino acid alteration (e.g., substitution) at position T3, H16, 192, in IL-2, or a combination thereof, optionally wherein the amino acid substitution is T3A, H16N, and I92S, in IL-2, respectively.

[0502] In an embodiment, the IL-2 fusion protein comprises an amino acid alteration (e.g., substitution) at position H16, V69, Q74, and C125, in IL-2, optionally wherein the amino acid substitution is H16N, V69A, Q74P, and C125S, in IL-2, respectively. In an embodiment, the IL-2 fusion protein comprises the amino acid substitutions H16N, V69A, Q74P, and C125S in IL-2.

[0503] In an embodiment, the IL-2 fusion protein comprises an amino acid alteration (e.g., substitution) at position H16, V69, Q74, and C125, in IL-2, optionally wherein the amino acid substitution is H16L, V69A, Q74P, and C125S, in IL-2, respectively. In an embodiment, the IL-2 fusion protein comprises the amino acid substitutions H16L, V69A, Q74P, and C125S, in IL-2.

[0504] In an embodiment, the IL-2 fusion protein comprises an amino acid alteration (e.g., substitution) at position H16, V69, Q74, 192, and C125, in IL-2, optionally wherein the amino acid substitution is H16L, V69A, Q74P, I92S, and C125S, in IL-2, respectively. In an embodiment, the IL-2 fusion protein comprises the amino acid substitutions H16L, V69A, Q74P, I92S, and C125S, in IL-2.

[0505] In an embodiment, the IL-2 fusion protein comprises an amino acid alteration (e.g., substitution) at position T3, V69, Q74, and C125, in IL-2, optionally wherein the amino acid substitution is T3A, V69A, Q74P, and C125S, in IL-2, respectively. In an embodiment, the IL-2 fusion protein comprises the amino acid substitutions T3A, V69A, Q74P, and C125S, in IL-2.

[0506] In an embodiment, the IL-2 fusion protein comprises an amino acid alteration (e.g., substitution) at position T3, H16, V69, Q74, and C125, in IL-2, optionally wherein the amino acid substitution is T3A, H16N or H16L, V69A, Q74P, and C125S, in IL-2, respectively. In an embodiment, the IL-2 fusion protein comprises the amino acid substitutions T3A, H16N, V69A, Q74P, and C125S. In an embodiment, the IL-2 fusion protein comprises the amino acid substitutions T3A, H16L, V69A, Q74P, and C125S, in IL-2.

[0507] In an embodiment, the IL-2 fusion protein comprises an amino acid alteration (e.g., substitution) at position T3, V69, Q74, 192, and C125, in IL-2, optionally wherein the amino acid substitution is T3A, V69A, Q74P, I92S, and C125S, in IL-2, respectively. In an embodiment, the IL-2 fusion protein comprises the amino acid substitutions T3A, V69A, Q74P, I92S, and C125S, in IL-2. In an embodiment, the IL-2 fusion protein comprises the amino acid substitutions T3A, V69A, Q74P, I92S, and C125S, in IL-2.

[0508] In an embodiment, the IL-2 fusion protein comprises an amino acid alteration (e.g., substitution) at position H16, K35, V69 and Q74, optionally wherein the amino acid substitution is H16L, K35E, V69A, and Q74P, respectively, in IL-2. In an embodiment, the IL-2 fusion protein comprises the amino acid substitutions H16L, K35E, V69A, and Q74P, in IL-2.

[0509] In an embodiment, the IL-2 fusion protein comprises an amino acid alteration (e.g., substitution) at position H16, R38, V69A, and Q74P, optionally wherein the amino acid substitution is H16L, R38Q, V69A, and Q74P, respectively, in IL-2. In an embodiment, the IL-2 fusion protein comprises the amino acid substitutions H16L, R38Q, V69A, and Q74P, in IL-2.

[0510] In an embodiment, the IL-2 fusion protein comprises the amino acid substitutions H16L, V69A, Q74P, and C125S, in IL-2.

[0511] Without wishing to be bound by theory, it is believed that in an embodiment, an IL-2 fusion protein comprising the amino acid substitutions H16L, V69A, Q74P, and C125S, can have at least one or more of the following advantageous properties: (i) has reduced binding affinity for CD122 and/or CD132, which increases the potency and selectivity of the IL-2 agent for regulatory T cells (Treg) compared to other T cell types; (ii) is significantly stable, e.g., due to the presence of stabilizing V69A and Q74P mutations; (iii) has reduced or decreased binding capacity and/or binding affinity for CD25, which improves the lifetime of the IL-2 agent; (iv) does not substantially promote expansion, activation, survival, and/or proliferation of T effector cells and/or natural killer (NK) cells in vitro and/or in vivo; and/or (v) has reduced incorrect disulfide pairing and improved stability, e.g., due to the presence of the C125S mutation. In an embodiment, an IL-2 agent comprising the H16L mutation has reduced binding affinity for CD122 and/or CD132 and/or increased potency and selectivity for Treg over other T cell types, compared to an IL-2 agent comprising other H16 mutations. These properties make an IL-2 variant comprising the amino acid substitutions H16L, V69A, Q74P, and C125S particularly suitable for treating disorders and conditions arising from abnormal immune responses, such as autoimmune diseases.

[0512] Thus, in an embodiment, an IL-2 fusion protein comprising amino acid substitutions H16L, V69A, Q74P, and C125S, has inter alia one or more (e.g., 2, 3, 4, 5, 6, 7, or all) of the following properties relative to a wild-type IL-2 or a reference IL-2 variant that does not comprise the amino acid substitutions: (i) enhanced or increased stability in vitro or in vivo; (ii) reduced or decreased binding capacity and/or binding affinity for human CD122 in vitro and/or in vivo; (iii) reduced or decreased binding capacity and/or binding affinity for human CD132 in vitro and/or in vivo; (iv) reduced or decreased affinity of the IL-2 variant for the heterodimeric IL-2 receptor composed of human CD122 and human CD132 (i.e. human CD122/CD132 heterodimer) in vitro and/or in vivo; (v) reduced or decreased or substantially unchanged binding capacity and/or binding affinity for human CD25 in vitro and/or in vivo; (vi) selective binding to regulatory T cells (e.g. Foxp3⁺ T cells); (vii) selective activation of the IL-2 signaling pathway in T regulatory cells (Tregs) in vitro or in vivo; or (viii) enhanced or increased ability to induce or promote Treg expansion, activity, survival and/or proliferation.

[0513] In an embodiment, the IL-2 fusion protein comprises an IL-2 variant comprising an amino acid sequence chosen from: SEQ ID NO: 2, SEQ ID NO: 3, SEQ ID NO: 4, SEQ ID NO: 5, SEQ ID NO: 6, SEQ ID NO: 7, SEQ ID NO: 8, SEQ ID NO: 9, SEQ ID NO: 10, SEQ ID NO: 11, SEQ ID NO: 12, SEQ ID NO: 13, SEQ ID NO: 14, SEQ ID NO: 15, SEQ ID NO: 16, SEQ ID NO: 17, SEQ ID NO: 18, SEQ ID NO: 19, SEQ ID NO: 20, SEQ ID NO: 21, SEQ ID NO: 22, SEQ ID NO: 23, SEQ ID NO: 24, SEQ ID NO: 25, SEQ ID NO: 26, SEQ ID NO: 27, SEQ ID NO: 28, SEQ ID NO: 29, SEQ ID NO: 30, SEQ ID NO: 31, SEQ ID NO: 32, SEQ ID NO: 33, SEQ ID NO: 34, SEQ ID NO: 35, SEQ ID NO: 36, SEQ ID NO: 37, SEQ ID NO: 38, SEQ ID NO: 1000, SEQ ID NO: 1001, SEQ ID NO: 1002, or an amino acid sequence with at least 80%, 85%, 90%, 91%, 92%, 93%, 94%, 95%, 96%, 97%, 98%, 99%, or more sequence identity thereof, or differing by no more than 1, 2, 3, 4, 5, 6, 7, 8, 9, 10, 11, 12, 13, 14, 15, 20, 25, or 30 amino acids thereto.

[0514] In an embodiment, the IL-2 fusion protein comprises an IL-2 variant comprising the amino acid sequence of SEQ ID NO: 4, or an amino acid sequence with at least 80%, 85%, 90%, 91%, 92%, 93%, 94%, 95%, 96%, 97%, 98%, 99%, or more sequence identity thereof, or differing by no more than 1, 2, 3, 4, 5, 6, 7, 8, 9, 10, 11, 12, 13, 14, 15, 20, 25, or 30 amino acids thereto. In an embodiment, the IL-2 fusion protein comprises an IL-2 variant comprising the amino acid sequence of SEQ ID NO: 5, or an amino acid sequence with at least 80%, 85%, 90%, 91%, 92%, 93%, 94%, 95%, 96%, 97%, 98%, 99%, or more sequence identity thereof, or differing by no more than 1, 2, 3, 4, 5, 6, 7, 8, 9, 10, 11, 12, 13, 14, 15, 20, 25, or 30 amino acids thereto. In an embodiment, the IL-2 fusion protein comprises the amino acid sequence of SEQ ID NO: 11, or an amino acid sequence with at least 80%, 85%, 90%, 91%, 92%, 93%, 94%, 95%, 96%, 97%, 98%, 99%, or more sequence identity thereof, or differing by no more than 1, 2, 3, 4, 5, 6, 7, 8, 9, 10, 11, 12, 13, 14, 15, 20, 25, or 30 amino acids thereto. In an embodiment, the IL-2 fusion protein comprises the amino acid sequence of SEQ ID NO: 1000, or an amino acid sequence with at least 80%, 85%, 90%, 91%, 92%, 93%, 94%, 95%, 96%, 97%, 98%, 99%, or more sequence identity thereof, or differing by no more than 1, 2, 3, 4, 5, 6, 7, 8, 9, 10, 11, 12, 13, 14, 15, 20, 25, or 30 amino acids thereto. In an embodiment, the IL-2 fusion protein comprises the amino acid sequence of SEQ ID NO: 1001, or an amino acid sequence with at least 80%, 85%, 90%, 91%, 92%, 93%, 94%, 95%, 96%, 97%, 98%, 99%, or more sequence identity thereof, or differing by no more than 1, 2, 3, 4, 5, 6, 7, 8, 9, 10, 11, 12, 13, 14, 15, 20, 25, or 30 amino acids thereto. In an embodiment, the IL-2 fusion protein comprises the amino acid sequence of SEQ ID NO: 1002, or an amino acid sequence with at least 80%, 85%, 90%, 91%, 92%, 93%, 94%, 95%, 96%, 97%, 98%, 99%, or more sequence identity thereof, or differing by no more than 1, 2, 3, 4, 5, 6, 7, 8, 9, 10, 11, 12, 13, 14, 15, 20, 25, or 30 amino acids thereto.

[0515] In an embodiment, the IL-2 fusion protein comprises the amino acid sequence of any of SEQ ID NOs: 4, 5, 11, 1000, 1001, or 1002, or a functional fragment thereof. In an embodiment, the IL-2 fusion protein comprises the amino acid sequence of SEQ ID NO: 4 or 5, or a functional fragment thereof. In an embodiment, the IL-2 fusion protein comprises the amino acid sequence of SEQ ID NO: 4, or a functional fragment thereof. In an embodiment, the IL-2 fusion protein comprises the amino acid sequence of SEQ ID NO: 5, or a functional fragment thereof. In an embodiment, the IL-2 fusion protein comprises the amino acid sequence of SEQ ID NO: 11, or a functional fragment thereof. In an embodiment, the IL-2 fusion protein comprises the amino acid sequence of SEQ ID NO: 1000, or a functional fragment thereof. In an embodiment, the IL-2 fusion protein comprises the amino acid sequence of SEQ ID NO: 1001, or a functional fragment thereof. In an embodiment, the IL-2 fusion protein comprises the amino acid sequence of SEQ ID NO: 1002, or a functional fragment thereof.

[0516] Without wishing to be bound by theory, it is believed that in an embodiment, an IL-2 fusion protein comprising the amino acid sequence of SEQ ID NO: 5, or a functional fragment thereof, can have at least one or more of the following advantageous properties: (i) has reduced binding affinity for CD122 and/or CD132, which increases the potency and selectivity of the IL-2 agent for regulatory T cells (Treg) compared to other T cell types; (ii) is significantly stable, e.g., due to the presence of stabilizing V69A and Q74P mutations; (iii) has reduced or decreased binding capacity and/or binding affinity for CD25, which improves the lifetime of the IL-2 agent; (iv) does not substantially promote expansion, activation, survival, and/or proliferation of T effector cells and/or natural killer (NK) cells in vitro and/or in vivo; and/or (v) has reduced incorrect disulfide pairing and improved stability, e.g., due to the presence of the C125S mutation. In an embodiment, an IL-2 agent comprising the H16L mutation has reduced binding affinity for CD122 and/or CD132 and/or increased potency and selectivity for Treg over other T cell types, compared to an IL-2 agent comprising other H16 mutations. These properties make an IL-2 fusion protein comprising the amino acid sequence of SEQ ID NO: 5 particularly suitable for treating disorders and conditions arising from abnormal immune responses, such as autoimmune diseases.

[0517] Thus, in an embodiment, an IL-2 fusion protein comprising the amino acid sequence SEQ ID NO: 5, or a functional fragment thereof, or an amino acid sequence with at least 80%, 85%, 90%, 91%, 92%, 93%, 94%, 95%, 96%, 97%, 98%, 99%, or more sequence identity thereof, or differing by no more than 1, 2, 3, 4, 5, 6, 7, 8, 9, 10, 11, 12, 13, 14, 15, 20, 25, or 30 amino acids thereto, has inter alia one or more (e.g., 2, 3, 4, 5, 6, 7, or all) of the following properties relative to a wild-type IL-2 or a reference IL-2 fusion protein that does not comprise the amino acid substitutions: (i) enhanced or increased stability in vitro or in vivo; (ii) reduced or decreased binding capacity and/or binding affinity for human CD122 in vitro and/or in vivo; (iii) reduced or decreased binding capacity and/or binding affinity for human CD132 in vitro and/or in vivo; (iv) reduced or decreased affinity of the IL-2 fusion protein for the heterodimeric IL-2 receptor composed of human CD122 and human CD132 (i.e. human CD122/CD132 heterodimer) in vitro and/or in vivo; (v) reduced or decreased or substantially unchanged binding capacity and/or binding affinity for human CD25 in vitro and/or in vivo; (vi) selective binding to regulatory T cells (e.g. Foxp3⁺ T cells); (vii) selective activation of the IL-2 signaling pathway in T regulatory cells (Tregs) in vitro or in vivo; or (viii) enhanced or increased ability to induce or promote Treg expansion, activity, survival and/or proliferation.

[0518] In an embodiment, the IL-2 fusion proteins described herein comprise an Fc region, e.g. an Fc region having one or more mutations described herein, and/or having one or more structural or functional properties described herein. Without wishing to be bound by theory, it is believed that in an embodiment, the Fc regions described herein can reduce (e.g., prevent) renal clearance and/or extend half-life of the IL-2 agents (e.g., via FcRn).

[0519] As used herein, the term “fusion protein” refers to a protein, comprising two or more protein or peptide components. The two or more protein or peptide components can be obtained from different sources or encoded by different genes. A fusion protein is sometimes also referred to as a chimeric protein. An Fc fusion protein (also known as Fc chimeric fusion protein, Fc-Ig, Ig-based chimeric fusion protein, or Fc-tag protein) can include an Fc region of an immunoglobulin (e.g., an Fc region described herein) linked (e.g., fused) to a protein or peptide. The Fc region can be linked (e.g., fused genetically) to the protein or peptide directly, or indirectly, e.g., through a linker. In an embodiment, the Fc region is derived from the Fc region of IgG, e.g., human IgG, e.g., IgG1, IgG2, IgG3, or IgG4. In an embodiment, the Fc region is derived from the Fc region of IgG1, e.g., human IgG1.

[0520] An IL-2 fusion protein can include an IL-2 variant (e.g., an IL-2 variant described herein), or a functional fragment thereof, linked (e.g., fused) to a protein or peptide. In an embodiment, the IL-2 fusion protein is an IL-2-Fc fusion protein, e.g., further comprising an Fc region of an immunoglobulin (e.g., an Fc region described herein) linked (e.g., fused) to the IL-2 polypeptide (e.g., an IL-2 variant described herein) or a functional fragment thereof. In an embodiment, the IL-2 fusion protein is not an IL-2-Fc fusion protein, e.g., an IL-2 fusion variant described herein, or a functional fragment thereof, is linked (e.g., fused) to a protein or peptide other than an Fc region of IgG, e.g., human IgG, e.g., IgG1, IgG2, IgG3, or IgG4.

[0521] In an embodiment, the IL-2 fusion protein comprises an amino acid sequence chosen from: SEQ ID NO: 56, SEQ ID NO: 57, SEQ ID NO: 58, SEQ ID NO: 59, SEQ ID NO: 60, SEQ ID NO: 61, SEQ ID NO: 62, SEQ ID NO: 63, SEQ ID NO: 64, SEQ ID NO: 65, SEQ ID NO: 66, SEQ ID NO: 67, SEQ ID NO: 68, SEQ ID NO: 69, SEQ ID NO: 70, SEQ ID NO: 71, SEQ ID NO: 72, SEQ ID NO: 73, SEQ ID NO: 74, SEQ ID NO: 75, SEQ ID NO: 76, SEQ ID NO: 77, SEQ ID NO: 78, SEQ ID NO: 79, SEQ ID NO: 80, SEQ ID NO: 81, SEQ ID NO: 82, SEQ ID NO: 83, SEQ ID NO: 84, SEQ ID NO: 85, SEQ ID NO: 86, SEQ ID NO: 87, SEQ ID NO: 88, SEQ ID NO: 89, SEQ ID NO: 90, SEQ ID NO: 91, SEQ ID NO: 92, SEQ ID NO: 93, or an amino acid sequence with at least 80%, 85%, 90%, 91%, 92%, 93%, 94%, 95%, 96%, 97%, 98%, 99%, or more sequence identity thereof, or differing by no more than 1, 2, 3, 4, 5, 6, 7, 8, 9, 10, 11, 12, 13, 14, 15, 20, 25, or 30 amino acids thereto.

[0522] In an embodiment, the IL-2 fusion protein comprises an amino acid sequence chosen from: SEQ ID NO: 94, SEQ ID NO: 95, SEQ ID NO: 96, SEQ ID NO: 97, SEQ ID NO: 98, SEQ ID NO: 99, SEQ ID NO: 100, SEQ ID NO: 101, SEQ ID NO: 102, SEQ ID NO: 103, SEQ ID NO: 104, SEQ ID NO: 105, SEQ ID NO: 106, SEQ ID NO: 107, SEQ ID NO: 108, SEQ ID NO: 109, SEQ ID NO: 110, SEQ ID NO: 111, SEQ ID NO: 112, SEQ ID NO: 113, SEQ ID NO: 114, SEQ ID NO: 115, SEQ ID NO: 116, SEQ ID NO: 117, SEQ ID NO: 118, SEQ ID NO: 119, SEQ ID NO: 120, SEQ ID NO: 121, SEQ ID NO: 122, SEQ ID NO: 123, SEQ ID NO: 124, SEQ ID NO: 125, SEQ ID NO: 126, SEQ ID NO: 127, SEQ ID NO: 128, SEQ ID NO: 129, SEQ ID NO: 130, or SEQ ID NO: 131, or an amino acid sequence with at least 80%, 85%, 90%, 91%, 92%, 93%, 94%, 95%, 96%, 97%, 98%, 99%, or more sequence identity thereof, or differing by no more than 1, 2, 3, 4, 5, 6, 7, 8, 9, 10, 11, 12, 13, 14, 15, 20, 25, or 30 amino acids thereto.

[0523] In an embodiment, the IL-2 fusion protein comprises an amino acid sequence chosen from: SEQ ID NO: 132, SEQ ID NO: 133, SEQ ID NO: 134, SEQ ID NO: 135, SEQ ID NO: 136, SEQ ID NO: 137, SEQ ID NO: 138, SEQ ID NO: 139, SEQ ID NO: 140, SEQ ID NO: 141, SEQ ID NO: 142, SEQ ID NO: 143, SEQ ID NO: 144, SEQ ID NO: 145, SEQ ID NO: 146, SEQ ID NO: 147, SEQ ID NO: 148, SEQ ID NO: 149, SEQ ID NO: 150, SEQ ID NO: 151, SEQ ID NO: 152, SEQ ID NO: 153, SEQ ID NO: 154, SEQ ID NO: 155, SEQ ID NO: 156, SEQ ID NO: 157, SEQ ID NO: 158, SEQ ID NO: 159, SEQ ID NO: 160, SEQ ID NO: 161, SEQ ID NO: 162, SEQ ID NO: 163, SEQ ID NO: 164, SEQ ID NO: 165, SEQ ID NO: 166, SEQ ID NO: 167, SEQ ID NO: 168, or SEQ ID NO: 169, or an amino acid sequence with at least 80%, 85%, 90%, 91%, 92%, 93%, 94%, 95%, 96%, 97%, 98%, 99%, or more sequence identity thereof, or differing by no more than 1, 2, 3, 4, 5, 6, 7, 8, 9, 10, 11, 12, 13, 14, 15, 20, 25, or 30 amino acids thereto.

[0524] In an embodiment, the IL-2 fusion protein comprises an amino acid sequence chosen from: SEQ ID NO: 170, SEQ ID NO: 171, SEQ ID NO: 172, SEQ ID NO: 173, SEQ ID NO: 174, SEQ ID NO: 175, SEQ ID NO: 176, SEQ ID NO: 177, SEQ ID NO: 178, SEQ ID NO: 179, SEQ ID NO: 180, SEQ ID NO: 181, SEQ ID NO: 182, SEQ ID NO: 183, SEQ ID NO: 184, SEQ ID NO: 185, SEQ ID NO: 186, SEQ ID NO: 187, SEQ ID NO: 188, SEQ ID NO: 189, SEQ ID NO: 190, SEQ ID NO: 191, SEQ ID NO: 192, SEQ ID NO: 193, SEQ ID NO: 194, SEQ ID NO: 195, SEQ ID NO: 196, SEQ ID NO: 197, SEQ ID NO: 198, SEQ ID NO: 199, SEQ ID NO: 200, SEQ ID NO: 201, SEQ ID NO: 202, SEQ ID NO: 203, SEQ ID NO: 204, SEQ ID NO: 205, SEQ ID NO: 206, or SEQ ID NO: 207, or an amino acid sequence with at least 80%, 85%, 90%, 91%, 92%, 93%, 94%, 95%, 96%, 97%, 98%, 99%, or more sequence identity thereof, or differing by no more than 1, 2, 3, 4, 5, 6, 7, 8, 9, 10, 11, 12, 13, 14, 15, 20, 25, or 30 amino acids thereto.

[0525] In an embodiment, the IL-2 fusion protein comprises an amino acid sequence chosen from: SEQ ID NO: 208, SEQ ID NO: 209, SEQ ID NO: 210, SEQ ID NO: 211, SEQ ID NO: 212, SEQ ID NO: 213, SEQ ID NO: 214, SEQ ID NO: 215, SEQ ID NO: 216, SEQ ID NO: 217, SEQ ID NO: 218, SEQ ID NO: 219, SEQ ID NO: 220, SEQ ID NO: 221, SEQ ID NO: 222, SEQ ID NO: 223, SEQ ID NO: 224, SEQ ID NO: 225, SEQ ID NO: 226, SEQ ID NO: 227, SEQ ID NO: 228, SEQ ID NO: 229, SEQ ID NO: 230, SEQ ID NO: 231, SEQ ID NO: 232, SEQ ID NO: 233, SEQ ID NO: 234, SEQ ID NO: 235, SEQ ID NO: 236, SEQ ID NO: 237, SEQ ID NO: 238, SEQ ID NO: 239, SEQ ID NO: 240, SEQ ID NO: 241, SEQ ID NO: 242, SEQ ID NO: 243, SEQ ID NO: 244, or SEQ ID NO: 245, or an amino acid sequence with at least 80%, 85%, 90%, 91%, 92%, 93%, 94%, 95%, 96%, 97%, 98%, 99%, or more sequence identity thereof, or differing by no more than 1, 2, 3, 4, 5, 6, 7, 8, 9, 10, 11, 12, 13, 14, 15, 20, 25, or 30 amino acids thereto.

[0526] In an embodiment, the IL-2 fusion protein comprises an amino acid sequence chosen from: SEQ ID NO: 246, SEQ ID NO: 247, SEQ ID NO: 248, SEQ ID NO: 249, SEQ ID NO: 250, SEQ ID NO: 251, SEQ ID NO: 252, SEQ ID NO: 253, SEQ ID NO: 254, SEQ ID NO: 255, SEQ ID NO: 256, SEQ ID NO: 257, SEQ ID NO: 258, SEQ ID NO: 259, SEQ ID NO: 260, SEQ ID NO: 261, SEQ ID NO: 262, SEQ ID NO: 263, SEQ ID NO: 264, SEQ ID NO: 265, SEQ ID NO: 266, SEQ ID NO: 267, SEQ ID NO: 268, SEQ ID NO: 269, SEQ ID NO: 270, SEQ ID NO: 271, SEQ ID NO: 272, SEQ ID NO: 273, SEQ ID NO: 274, SEQ ID NO: 275, SEQ ID NO: 276, SEQ ID NO: 277, SEQ ID NO: 278, SEQ ID NO: 279, SEQ ID NO: 280, SEQ ID NO: 281, SEQ ID NO: 282, or SEQ ID NO: 283, or an amino acid sequence with at least 80%, 85%, 90%, 91%, 92%, 93%, 94%, 95%, 96%, 97%, 98%, 99%, or more sequence identity thereof, or differing by no more than 1, 2, 3, 4, 5, 6, 7, 8, 9, 10, 11, 12, 13, 14, 15, 20, 25, or 30 amino acids thereto.

[0527] In an embodiment, the IL-2 fusion protein comprises an amino acid sequence chosen from: SEQ ID NO: 284, SEQ ID NO: 285, SEQ ID NO: 286, SEQ ID NO: 287, SEQ ID NO: 288, SEQ ID NO: 289, SEQ ID NO: 290, SEQ ID NO: 291, SEQ ID NO: 292, SEQ ID NO: 293, SEQ ID NO: 294, SEQ ID NO: 295, SEQ ID NO: 296, SEQ ID NO: 297, SEQ ID NO: 298, SEQ ID NO: 299, SEQ ID NO: 300, SEQ ID NO: 301, SEQ ID NO: 302, SEQ ID NO: 303, SEQ ID NO: 304, SEQ ID NO: 305, SEQ ID NO: 306, SEQ ID NO: 307, SEQ ID NO: 308, SEQ ID NO: 309, SEQ ID NO: 310, SEQ ID NO: 311, SEQ ID NO: 312, SEQ ID NO: 313, SEQ ID NO: 314, SEQ ID NO: 315, SEQ ID NO: 316, SEQ ID NO: 317, SEQ ID NO: 318, SEQ ID NO: 319, SEQ ID NO: 320, or SEQ ID NO: 321, or an amino acid sequence with at least 80%, 85%, 90%, 91%, 92%, 93%, 94%, 95%, 96%, 97%, 98%, 99%, or more sequence identity thereof, or differing by no more than 1, 2, 3, 4, 5, 6, 7, 8, 9, 10, 11, 12, 13, 14, 15, 20, 25, or 30 amino acids thereto.

[0528] In an embodiment, the IL-2 fusion protein comprises an amino acid sequence chosen from: SEQ ID NO: 322, SEQ ID NO: 323, SEQ ID NO: 324, SEQ ID NO: 325, SEQ ID NO: 326, SEQ ID NO: 327, SEQ ID NO: 328, SEQ ID NO: 329, SEQ ID NO: 330, SEQ ID NO: 331, SEQ ID NO: 332, SEQ ID NO: 333, SEQ ID NO: 334, SEQ ID NO: 335, SEQ ID NO: 336, SEQ ID NO: 337, SEQ ID NO: 338, SEQ ID NO: 339, SEQ ID NO: 340, SEQ ID NO: 341, SEQ ID NO: 342, SEQ ID NO: 343, SEQ ID NO: 344, SEQ ID NO: 345, SEQ ID NO: 346, SEQ ID NO: 347, SEQ ID NO: 348, SEQ ID NO: 349, SEQ ID NO: 350, SEQ ID NO: 351, SEQ ID NO: 352, SEQ ID NO: 353, SEQ ID NO: 354, SEQ ID NO: 355, SEQ ID NO: 356, SEQ ID NO: 357, SEQ ID NO: 358, or SEQ ID NO: 359, or an amino acid sequence with at least 80%, 85%, 90%, 91%, 92%, 93%, 94%, 95%, 96%, 97%, 98%, 99%, or more sequence identity thereof, or differing by no more than 1, 2, 3, 4, 5, 6, 7, 8, 9, 10, 11, 12, 13, 14, 15, 20, 25, or 30 amino acids thereto.

[0529] In an embodiment, the IL-2 fusion protein comprises an amino acid sequence chosen from: 1004, SEQ ID NO: 1005, SEQ ID NO: 1006, SEQ ID NO: 1007, SEQ ID NO: 1008, SEQ ID NO: 1009 or an amino acid sequence with at least 80%, 85%, 90%, 91%, 92%, 93%, 94%, 95%, 96%, 97%, 98%, 99%, or more sequence identity thereof, or differing by no more than 1, 2, 3, 4, 5, 6, 7, 8, 9, 10, 11, 12, 13, 14, 15, 20, 25, or 30 amino acids thereto. In an embodiment, the IL-2 fusion protein comprises the amino acid sequence of SEQ ID NO: 1004, or an amino acid sequence with at least 80%, 85%, 90%, 91%, 92%, 93%, 94%, 95%, 96%, 97%, 98%, 99%, or more sequence identity thereof, or differing by no more than 1, 2, 3, 4, 5, 6, 7, 8, 9, 10, 11, 12, 13, 14, 15, 20, 25, or 30 amino acids thereto. In an embodiment, the IL-2 fusion protein comprises the amino acid sequence of SEQ ID NO: 1005, or an amino acid sequence with at least 80%, 85%, 90%, 91%, 92%, 93%, 94%, 95%, 96%, 97%, 98%, 99%, or more sequence identity thereof, or differing by no more than 1, 2, 3, 4, 5, 6, 7, 8, 9, 10, 11, 12, 13, 14, 15, 20, 25, or 30 amino acids thereto. In an embodiment, the IL-2 fusion protein comprises the amino acid sequence of SEQ ID NO: 1006, or an amino acid sequence with at least 80%, 85%, 90%, 91%, 92%, 93%, 94%, 95%, 96%, 97%, 98%, 99%, or more sequence identity thereof, or differing by no more than 1, 2, 3, 4, 5, 6, 7, 8, 9, 10, 11, 12, 13, 14, 15, 20, 25, or 30 amino acids thereto. In an embodiment, the IL-2 fusion protein comprises the amino acid sequence of SEQ ID NO: 1007, or an amino acid sequence with at least 80%, 85%, 90%, 91%, 92%, 93%, 94%, 95%, 96%, 97%, 98%, 99%, or more sequence identity thereof, or differing by no more than 1, 2, 3, 4, 5, 6, 7, 8, 9, 10, 11, 12, 13, 14, 15, 20, 25, or 30 amino acids thereto. In an embodiment, the IL-2 fusion protein comprises the amino acid sequence of SEQ ID NO: 1008, or an amino acid sequence with at least 80%, 85%, 90%, 91%, 92%, 93%, 94%, 95%, 96%, 97%, 98%, 99%, or more sequence identity thereof, or differing by no more than 1, 2, 3, 4, 5, 6, 7, 8, 9, 10, 11, 12, 13, 14, 15, 20, 25, or 30 amino acids thereto.

[0530] In an embodiment, the IL-2 agent comprises the amino acid sequence of any of SEQ ID NOs: 1004-1009, or a functional fragment thereof. In an embodiment, the IL-2 agent comprises the amino acid sequence of SEQ ID NO: 1007 or 1008, or a functional fragment thereof. In an embodiment, the IL-2 agent comprises the amino acid sequence of SEQ ID NO: 1004, or a functional fragment thereof. In an embodiment, the IL-2 agent comprises the amino acid sequence of SEQ ID NO: 1005, or a functional fragment thereof. In an embodiment, the IL-2 agent comprises the amino acid sequence of SEQ ID NO: 1006, or a functional fragment thereof. In an embodiment, the IL-2 agent comprises the amino acid sequence of SEQ ID NO: 1007, or a functional fragment thereof. In an embodiment, the IL-2 agent comprises the amino acid sequence of SEQ ID NO: 1008, or a functional fragment thereof. In an embodiment, the IL-2 agent comprises the amino acid sequence of SEQ ID NO: 1009, or a functional fragment thereof.

[0531] Without wishing to be bound by theory, it is also believed that in an embodiment, an IL-2 fusion protein comprising the amino acid sequence of SEQ ID NO: 1008, or a functional fragment thereof, can have at least one or more of the following advantageous properties: (i) has reduced binding affinity for CD122 and/or CD132, which increases the potency and selectivity of the IL-2 agent for regulatory T cells (Treg) compared to other T cell types; (ii) is significantly stable, e.g., due to the presence of stabilizing V69A and Q74P mutations; (iii) has reduced or decreased binding capacity and/or binding affinity for CD25, which improves the lifetime of the IL-2 agent; (iv) does not substantially promote expansion, activation, survival, and/or proliferation of T effector cells and/or natural killer (NK) cells in vitro and/or in vivo; (v) has reduced incorrect disulfide pairing and improved stability, e.g., due to the presence of the C125S mutation; and/or (vi) has reduced effector function, e.g., by reduced Fc glycosylation due to the N297G mutation in the Fc region. In an embodiment, an IL-2 agent comprising the H16L mutation has reduced binding affinity for CD122 and/or CD132 and/or increased potency and selectivity for Treg over other T cell types, compared to an IL-2 agent comprising other H16 mutations. These properties make an IL-2 fusion protein comprising the amino acid sequence of SEQ ID NO: 1008 particularly suitable for treating disorders and conditions arising from abnormal immune responses, such as autoimmune diseases.

[0532] Thus, in an embodiment, an IL-2 fusion protein comprising the amino acid sequence SEQ ID NO: 1008, or a functional fragment thereof, or an amino acid sequence with at least 80%, 85%, 90%, 91%, 92%, 93%, 94%, 95%, 96%, 97%, 98%, 99%, or more sequence identity thereof, or differing by no more than 1, 2, 3, 4, 5, 6, 7, 8, 9, 10, 11, 12, 13, 14, 15, 20, 25, 30, 35, 40, 45, or 50 amino acids thereto, has inter alia one or more (e.g., 2, 3, 4, 5, 6, 7, 8, or all) of the following properties relative to a wild-type IL-2 or a reference IL-2 fusion protein that does not comprise the amino acid substitutions: (i) enhanced or increased stability in vitro or in vivo; (ii) reduced or decreased binding capacity and/or binding affinity for human CD122 in vitro and/or in vivo; (iii) reduced or decreased binding capacity and/or binding affinity for human CD132 in vitro and/or in vivo; (iv) reduced or decreased affinity of the IL-2 fusion protein for the heterodimeric IL-2 receptor composed of human CD122 and human CD132 (i.e. human CD122/CD132 heterodimer) in vitro and/or in vivo; (v) reduced or decreased or substantially unchanged binding capacity and/or binding affinity for human CD25 in vitro and/or in vivo; (vi) selective binding to regulatory T cells (e.g. Foxp3+ T cells); (vii) selective activation of the IL-2 signaling pathway in T regulatory cells (Tregs) in vitro or in vivo; (viii) enhanced or increased ability to induce or promote Treg expansion, activity, survival and/or proliferation; or (ix) reduced or decreased effector function.

[0533] In an embodiment, the IL-2 fusion protein comprises from N-terminus to C-terminus an IL-2 variant described herein and an Fc region (e.g., Fc region described herein). In an embodiment, the fusion protein further comprises a linker (e.g., a linker described herein) between the IL-2 variant and the Fc region. In an embodiment the IL-2 fusion forms a dimer, e.g., a homodimer.

[0534] In an embodiment, the fusion protein comprises one or more glycosylation sites, or is glycosylated. In another embodiment, the fusion protein does not have a glycosylation site, or is not glycosylated.

[0535] In an embodiment, the only amino acids in the fusion protein are canonical amino acids. In an embodiment, the fusion protein comprises naturally-occurring amino acids; analogs, derivatives and congeners thereof; amino acid analogs having variant side chains; and/or all stereoisomers of any of any of the foregoing. The fusion protein may comprise the D- or L-optical isomers of amino acids and peptidomimetics.

[0536] In an aspect, this disclosure provides a method of making an IL-2 fusion protein disclosed herein. The IL-2 fusion proteins described herein can be produced by any suitable recombinant DNA technique. In an embodiment, the method includes culturing a cell containing a nucleic acid encoding the IL-2 fusion protein under conditions that allow production of the fusion protein. In another embodiment, the method further includes isolating or purifying the IL-2 fusion protein. In yet another embodiment, the method further includes evaluating efficacy of the IL-2 fusion protein in a cell-based assay or in an animal model. In still another embodiment, the method further includes administering the IL-2 fusion protein to a subject, e.g., a human.

[0537] This disclosure provides an isolated nucleic acid molecule encoding an IL-2 fusion protein described herein, and vectors and host cells thereof. The nucleic acid molecule includes, but is not limited to, RNA, genomic DNA and cDNA.

### IL-2 Complexes

[0538] In an embodiment, the IL-2 agent comprises an IL-2 complex, e.g., an IL-2 complex described herein. In an embodiment, the IL-2 complex is an IL-2/anti-IL-2 antibody immune complex (IL-2 ic).

[0539] Without wishing to be bound by theory, it is believed that in an embodiment, IL-2 complexes, such as IL-2/anti-IL-2 antibody immune complexes, can potentiate biologic activity of IL-2 in vivo. For example, the effect of IL-2 on cells (e.g., Tregs) can be modulated by complexing IL-2 with distinct mAbs that specifically bind IL-2. The mechanisms can include, e.g., the prolongation of the cytokine half-life in circulation. Depending on the clone of IL-2 antibody, IL-2 ic can selectively stimulate, for example, CD25high cells (e.g., IL-2/JES6-1 immune complexes), or CD122high cells (e.g., IL-2/S4B6 immune complexes). For example, IL-2/JES6-1 immune complexes highly selectively stimulate regulatory T cells and they can be useful for transplantations and in treatment of autoimmune diseases. As another example, IL-2/S4B6 immune complexes can have high stimulatory activity for NK cells and memory CD8+ T cells and they can replace the conventional IL-2 in cancer immunotherapy.

[0540] In an embodiment, the IL-2 complex comprises an IL-2 variant described herein. In an embodiment, the IL-2 complex comprises one or more amino acid alterations (e.g., substitutions) described in Table 9. In an embodiment, the IL-2 complex comprises an amino acid sequence described in Table 9, or a functional fragment thereof. In an embodiment, the IL-2 complex comprises an anti-IL-2 antibody molecule. In an embodiment, the IL-2 complex comprises an IL-2 variant described herein and an anti-IL-2 antibody molecule. In an embodiment, the anti-IL-2 antibody molecule binds to the IL-2 variant. In an embodiment, the anti-IL-2 antibody molecule is capable of binding to the IL-2 variant and the wild-type IL-2. In an embodiment, the IL-2 variant comprises one or more mutations described herein. In an embodiment, the one or more mutations does not reduce, or does not substantially reduce, binding of the IL-2 variant to an anti-IL-2 antibody molecule.

[0541] In an embodiment, the IL-2 complex comprises an amino acid sequence chosen from: SEQ ID NO: 2, SEQ ID NO: 3, SEQ ID NO: 4, SEQ ID NO: 5, SEQ ID NO: 6, SEQ ID NO: 7, SEQ ID NO: 8, SEQ ID NO: 9, SEQ ID NO: 10, SEQ ID NO: 11, SEQ ID NO: 12, SEQ ID NO: 13, SEQ ID NO: 14, SEQ ID NO: 15, SEQ ID NO: 16, SEQ ID NO: 17, SEQ ID NO: 18, SEQ ID NO: 19, SEQ ID NO: 20, SEQ ID NO: 21, SEQ ID NO: 22, SEQ ID NO: 23, SEQ ID NO: 24, SEQ ID NO: 25, SEQ ID NO: 26, SEQ ID NO: 27, SEQ ID NO: 28, SEQ ID NO: 29, SEQ ID NO: 30, SEQ ID NO: 31, SEQ ID NO: 32, SEQ ID NO: 33, SEQ ID NO: 34, SEQ ID NO: 35, SEQ ID NO: 36, SEQ ID NO: 37, SEQ ID NO: 38, SEQ ID NO: 1000, SEQ ID NO: 1001, SEQ ID NO: 1002, or an amino acid sequence with at least 80%, 85%, 90%, 91%, 92%, 93%, 94%, 95%, 96%, 97%, 98%, 99%, or more sequence identity thereof, or differing by no more than 1, 2, 3, 4, 5, 6, 7, 8, 9, 10, 11, 12, 13, 14, 15, 20, 25, or 30 amino acids thereto.

[0542] In an embodiment, the IL-2 complex modulates (e.g., stimulates) one or more activities of T cells. In an embodiment, the IL-2 complex stimulates CD25high cells. In an embodiment, the IL-2 complex stimulates Tregs. In an embodiment, the IL-2 complex stimulates CD122high cells. In an embodiment, the IL-2 complex stimulates NK cells and/or memory CD8+ T cells. In an embodiment, the IL-2 complex selectively stimulates CD25high cells over CD122high cells. In an embodiment, the IL-2 complex selectively stimulates CD122high cells over CD25high cells. In an embodiment, the IL-2 complex selectively stimulates Tregs over NK cells and/or memory CD8+ T cells. In an embodiment, the IL-2 complex selectively stimulates NK cells and/or memory CD8+ T cells over Tregs.

[0543] Exemplary anti-IL-2 antibody molecules suitable for use are described, e.g., in International Application Publication No. WO 2016/164937, which is incorporated herein by reference in its entirety.

[0544] As used herein, the term “antibody molecule” refers to a protein, e.g., an immunoglobulin chain or a fragment thereof, comprising at least one immunoglobulin variable domain sequence. The term “antibody molecule” includes, for example, full-length, mature antibodies and antigen-binding fragments of an antibody. For example, an antibody molecule can include a heavy (H) chain variable domain sequence (abbreviated herein as VH), and a light (L) chain variable domain sequence (abbreviated herein as VL). In another example, an antibody molecule includes two heavy (H) chain variable domain sequences and two light (L) chain variable domain sequence, thereby forming two antigen binding sites, such as Fab, Fab′, F(ab′)2, Fc, Fd, Fd′, Fv, single chain antibodies (scFv for example), single variable domain antibodies, diabodies (Dab) (bivalent and bispecific), and chimeric (e.g., humanized) antibodies, which may be produced by the modification of whole antibodies or those synthesized de novo using recombinant DNA technologies. These functional antibody fragments retain the ability to selectively bind with their respective antigen or receptor. Antibodies and antibody fragments can be from any class of antibodies including, but not limited to, IgG, IgA, IgM, IgD, and IgE, and from any subclass (e.g., IgG1, IgG2, IgG3, and IgG4) of antibodies. The antibody molecules can be monoclonal or polyclonal. The antibody molecule can also be a human, humanized, CDR-grafted, or in vitro generated antibody. The antibody molecule can have a heavy chain constant region chosen from, e.g., IgG1, IgG2, IgG3, or IgG4. The antibody molecule can also have a light chain chosen from, e.g., kappa or lambda. The term “immunoglobulin” (Ig) is used interchangeably with the term “antibody” herein.

[0545] Examples of antigen-binding fragments include: (i) a Fab fragment, a monovalent fragment consisting of the VL, VH, CL and CH1 domains; (ii) a F(ab′)2 fragment, a bivalent fragment comprising two Fab fragments linked by a disulfide bridge at the hinge region; (iii) a Fd fragment consisting of the VH and CH1 domains; (iv) a Fv fragment consisting of the VL and VH domains of a single arm of an antibody, (v) a diabody (dAb) fragment, which consists of a VH domain; (vi) a camelid or camelized variable domain; (vii) a single chain Fv (scFv), see e.g., Bird et al. (1988) Science 242:423-426; and Huston et al. (1988) Proc. Natl. Acad. Sci. USA 85:5879-5883); (viii) a single domain antibody. These antibody fragments may be obtained using any suitable method, including several conventional techniques known to those with skill in the art, and the fragments can be screened for utility in the same manner as are intact antibodies.

[0546] The term “antibody” includes intact molecules as well as functional fragments thereof. Constant regions of the antibodies can be altered, e.g., mutated, to modify the properties of the antibody (e.g., to increase or decrease one or more of: Fc receptor binding, antibody glycosylation, the number of cysteine residues, effector cell function, or complement function).

[0547] The antibody molecule can be a single chain antibody. A single-chain antibody (scFV) may be engineered (see, for example, Colcher, D. et al. (1999) Ann N Y Acad Sci 880:263-80; and Reiter, Y. (1996) Clin Cancer Res 2:245-52). The single chain antibody can be dimerized or multimerized to generate multivalent antibodies having specificities for different epitopes of the same target protein.

[0548] The antibody molecules disclosed herein can also be single domain antibodies. Single domain antibodies can include antibodies whose complementary determining regions are part of a single domain polypeptide. Examples include, but are not limited to, heavy chain antibodies, antibodies naturally devoid of light chains, single domain antibodies derived from conventional 4-chain antibodies, engineered antibodies and single domain scaffolds other than those derived from antibodies. Single domain antibodies may be any of the art, or any future single domain antibodies. Single domain antibodies may be derived from any species including, but not limited to mouse, human, camel, llama, fish, shark, goat, rabbit, and bovine. According to some aspects, a single domain antibody is a naturally occurring single domain antibody known as heavy chain antibody devoid of light chains. Such single domain antibodies are disclosed in WO 94/04678, for example. For clarity reasons, this variable domain derived from a heavy chain antibody naturally devoid of light chain is known herein as a VHH or nanobody to distinguish it from the conventional VH of four chain immunoglobulins. Such a VHH molecule can be derived from antibodies raised in Camelidae species, for example in camel, llama, dromedary, alpaca and guanaco. Other species besides Camelidae may produce heavy chain antibodies naturally devoid of light chain; such VHHs are also contemplated.

[0549] The VH and VL regions can be subdivided into regions of hypervariability, termed “complementarity determining regions” (CDR), interspersed with regions that are more conserved, termed “framework regions” (FR or FW). The terms “complementarity determining region,” and “CDR,” as used herein refer to the sequences of amino acids within antibody variable regions which confer antigen specificity and binding affinity. As used herein, the terms “framework,” “FW” and “FR” are used interchangeably.

[0550] The extent of the framework region and CDRs has been precisely defined by a number of methods (see, Kabat, E. A., et al. (1991) Sequences of Proteins of Immunological Interest, Fifth Edition, U.S. Department of Health and Human Services, NIH Publication No. 91-3242; Chothia, C. et al. (1987) J. Mol. Biol. 196:901-917; and the AbM definition used by Oxford Molecular's AbM antibody modeling software. See, generally, e.g., Protein Sequence and Structure Analysis of Antibody Variable Domains. In: Antibody Engineering Lab Manual (Ed.: Duebel, S. and Kontermann, R., Springer-Verlag, Heidelberg). In an embodiment, the following definitions are used: AbM definition of CDR1 of the heavy chain variable domain and Kabat definitions for the other CDRs. In an embodiment, Kabat definitions are used for all CDRs. In addition, embodiments described with respect to Kabat or AbM CDRs may also be implemented using Chothia hypervariable loops. Each VH and VL typically includes three CDRs and four FRs, arranged from amino-terminus to carboxy-terminus in the following order: FR1, CDR1, FR2, CDR2, FR3, CDR3, and FR4.

[0551] As used herein, an “immunoglobulin variable domain sequence” refers to an amino acid sequence which can form the structure of an immunoglobulin variable domain. For example, the sequence may include all or part of the amino acid sequence of a naturally-occurring variable domain. For example, the sequence may or may not include one, two, or more N- or C-terminal amino acids or may include other alterations that are compatible with formation of the protein structure.

[0552] The term “antigen-binding region” refers to the part of an antibody molecule that comprises determinants that form an interface that binds to an antigen, or an epitope thereof. With respect to proteins (or protein mimetics), the antigen-binding region typically includes one or more loops (of at least, e.g., four amino acids or amino acid mimics) that form an interface that binds to the antigen. Typically, the antigen-binding region of an antibody molecule includes at least one or two CDRs and/or hypervariable loops, or more typically at least three, four, five or six CDRs and/or hypervariable loops.

[0553] The terms “compete” or “cross-compete” are used interchangeably herein to refer to the ability of an antibody molecule to interfere with binding of another antibody molecule to a target. The interference with binding can be direct or indirect (e.g., through an allosteric modulation of the antibody molecule or the target). The extent to which an antibody molecule is able to interfere with the binding of another antibody molecule to the target, and therefore whether it can be said to compete, can be determined using a competition binding assay, for example, a FACS assay, an ELISA or BIACORE assay. In an embodiment, a competition binding assay is a quantitative competition assay. In an embodiment, a first antibody molecule is said to compete for binding to the target with a second antibody molecule when the binding of the first antibody molecule to the target is reduced by 10% or more, e.g., 20% or more, 30% or more, 40% or more, 50% or more, 55% or more, 60% or more, 65% or more, 70% or more, 75% or more, 80% or more, 85% or more, 90% or more, 95% or more, 98% or more, 99% or more in a competition binding assay (e.g., a competition assay described herein).

[0554] The terms “monoclonal antibody” or “monoclonal antibody composition” as used herein refer to a preparation of antibody molecules of single molecular composition. A monoclonal antibody composition displays a single binding specificity and affinity for a particular epitope. A monoclonal antibody can be made by hybridoma technology or by methods that do not use hybridoma technology (e.g., recombinant methods).

[0555] An “effectively human” protein is a protein that does not evoke a neutralizing antibody response, e.g., the human anti-murine antibody (HAMA) response. HAMA can be problematic in a number of circumstances, e.g., if the antibody molecule is administered repeatedly, e.g., in treatment of a chronic or recurrent disease condition. A HAMA response can make repeated antibody administration potentially ineffective because of an increased antibody clearance from the serum (see, e.g., Saleh et al., Cancer Immunol. Immunother. 32:180-190 (1990)) and also because of potential allergic reactions (see, e.g., LoBuglio et al., Hybridoma, 5:5117-5123 (1986)).

[0556] The antibody molecule can be a polyclonal or a monoclonal antibody. In an embodiment, the antibody can be recombinantly produced, e.g., produced by any suitable phage display or combinatorial methods.

[0557] Various phage display and combinatorial methods for generating antibodies are known in the art (as described in, e.g., Ladner et al. U.S. Pat. No. 5,223,409; Kang et al. International Publication No. WO 92/18619; Dower et al. International Publication No. WO 91/17271; Winter et al. International Publication WO 92/20791; Markland et al. International Publication No. WO 92/15679; Breitling et al. International Publication WO 93/01288; McCafferty et al. International Publication No. WO 92/01047; Garrard et al. International Publication No. WO 92/09690; Ladner et al. International Publication No. WO 90/02809; Fuchs et al. (1991) Bio/Technology 9:1370-1372; Hay et al. (1992) Hum Antibod Hybridomas 3:81-85; Huse et al. (1989) Science 246:1275-1281; Griffths et al. (1993) EMBO J 12:725-734; Hawkins et al. (1992) J Mol Biol 226:889-896; Clackson et al. (1991) Nature 352:624-628; Gram et al. (1992) PNAS 89:3576-3580; Garrad et al. (1991) Bio/Technology 9:1373-1377; Hoogenboom et al. (1991) Nuc Acid Res 19:4133-4137; and Barbas et al. (1991) PNAS 88:7978-7982, the contents of all of which are incorporated by reference herein).

[0558] In an embodiment, the antibody molecule is a fully human antibody (e.g., an antibody made in a mouse which has been genetically engineered to produce an antibody from a human immunoglobulin sequence), or a non-human antibody, e.g., a rodent (mouse or rat), goat, primate (e.g., monkey), camel antibody. In an embodiment, the non-human antibody is a rodent (mouse or rat antibody). Methods of producing rodent antibodies are known in the art.

[0559] Human monoclonal antibodies can be generated using transgenic mice carrying the human immunoglobulin genes rather than the mouse system. Splenocytes from these transgenic mice immunized with the antigen of interest are used to produce hybridomas that secrete human mAbs with specific affinities for epitopes from a human protein (see e.g., Wood et al. International Application WO 91/00906, Kucherlapati et al. PCT publication WO 91/10741; Lonberg et al. International Application WO 92/03918; Kay et al. International Application 92/03917; Lonberg et al. 1994 Nature 368:856-859; Green, L. L. et al. 1994 Nature Genet. 7:13-21; Morrison, S. L. et al. 1994 Proc. Natl. Acad. Sci. USA 81:6851-6855; Bruggeman et al. 1993 Year Immunol 7:33-40; Tuaillon et al. 1993 PNAS 90:3720-3724; Bruggeman et al. 1991 Eur J Immunol 21:1323-1326).

[0560] An antibody can be one in which the variable region, or a portion thereof, e.g., the CDRs, are generated in a non-human organism, e.g., a rat or mouse. Chimeric, CDR-grafted, and humanized antibodies are within the invention. Antibodies generated in a non-human organism, e.g., a rat or mouse, and then modified, e.g., in the variable framework or constant region, to decrease antigenicity in a human are within the invention.

[0561] Chimeric antibodies can be produced by any suitable recombinant DNA technique. Several are known in the art (see Robinson et al., International Patent Publication PCT/US86/02269; Akira, et al., European Patent Application 184,187; Taniguchi, M., European Patent Application 171,496; Morrison et al., European Patent Application 173,494; Neuberger et al., International Application WO 86/01533; Cabilly et al. U.S. Pat. No. 4,816,567; Cabilly et al., European Patent Application 125,023; Better et al. (1988 Science 240:1041-1043); Liu et al. (1987) PNAS 84:3439-3443; Liu et al., 1987, J. Immunol. 139:3521-3526; Sun et al. (1987) PNAS 84:214-218; Nishimura et al., 1987, Canc. Res. 47:999-1005; Wood et al. (1985) Nature 314:446-449; and Shaw et al., 1988, J. Natl Cancer Inst. 80:1553-1559).

[0562] A humanized or CDR-grafted antibody will have at least one or two but generally all three recipient CDRs (of heavy and or light immunoglobulin chains) replaced with a donor CDR. The antibody may be replaced with at least a portion of a non-human CDR or only some of the CDRs may be replaced with non-human CDRs. It is only necessary to replace the number of CDRs required for binding of the humanized antibody to lipopolysaccharide. In an embodiment, the donor will be a rodent antibody, e.g., a rat or mouse antibody, and the recipient will be a human framework or a human consensus framework. Typically, the immunoglobulin providing the CDRs is called the “donor” and the immunoglobulin providing the framework is called the “acceptor.” In an embodiment, the donor immunoglobulin is a non-human (e.g., rodent). The acceptor framework is typically a naturally-occurring (e.g., a human) framework or a consensus framework, or a sequence about 85% or higher, e.g., 90%, 95%, 99% or higher identical thereto.

[0563] As used herein, the term “consensus sequence” refers to the sequence formed from the most frequently occurring amino acids (or nucleotides) in a family of related sequences (See e.g., Winnaker, From Genes to Clones (Verlagsgesellschaft, Weinheim, Germany 1987). In a family of proteins, each position in the consensus sequence is occupied by the amino acid occurring most frequently at that position in the family. If two amino acids occur equally frequently, either can be included in the consensus sequence. A “consensus framework” refers to the framework region in the consensus immunoglobulin sequence.

[0564] An antibody can be humanized by any suitable method, and several such methods known in the art (see e.g., Morrison, S. L., 1985, Science 229:1202-1207, by Oi et al., 1986, BioTechniques 4:214, and by Queen et al. U.S. Pat. Nos. 5,585,089, 5,693,761 and 5,693,762, the contents of all of which are hereby incorporated by reference).

[0565] Humanized or CDR-grafted antibodies can be produced by CDR-grafting or CDR substitution, wherein one, two, or all CDRs of an immunoglobulin chain can be replaced. See e.g., U.S. Pat. No. 5,225,539; Jones et al. 1986 Nature 321:552-525; Verhoeyan et al. 1988 Science 239:1534; Beidler et al. 1988 J. Immunol. 141:4053-4060; Winter U.S. Pat. No. 5,225,539, the contents of all of which are hereby expressly incorporated by reference. Winter describes a CDR-grafting method which may be used to prepare humanized antibodies (UK Patent Application GB 2188638A, filed on Mar. 26, 1987; Winter U.S. Pat. No. 5,225,539), the contents of which is expressly incorporated by reference.

[0566] Also provided are humanized antibodies in which specific amino acids have been substituted, deleted or added. Criteria for selecting amino acids from the donor are described in, e.g., U.S. Pat. No. 5,585,089, e.g., columns 12-16 of U.S. Pat. No. 5,585,089, the contents of which are hereby incorporated by reference. Other techniques for humanizing antibodies are described in Padlan et al. EP 519596 A1, published on Dec. 23, 1992.

[0567] In an embodiment, the antibody molecule has a heavy chain constant region chosen from, e.g., the heavy chain constant regions of IgG1, IgG2 (e.g., IgG2a), IgG3, IgG4, IgM, IgA1, IgA2, IgD, and IgE; particularly, chosen from, e.g., the (e.g., human) heavy chain constant regions of IgG1, IgG2, IgG3, and IgG4. In another embodiment, the antibody molecule has a light chain constant region chosen from, e.g., the (e.g., human) light chain constant regions of kappa or lambda. The constant region can be altered, e.g., mutated, to modify the properties of the antibody molecule (e.g., to increase or decrease one or more of: Fc receptor binding, antibody glycosylation, the number of cysteine residues, effector cell function, and/or complement function). In an embodiment, the antibody molecule has effector function and can fix complement. In another embodiment, the antibody molecule does not recruit effector cells or fix complement. In certain embodiments, the antibody molecule has reduced or no ability to bind an Fc receptor. For example, it may be an isotype or subtype, fragment or other mutant, which does not support binding to an Fc receptor, e.g., it has a mutagenized or deleted Fc receptor binding region.

[0568] In an embodiment, a constant region of the antibody molecule is altered. Methods for altering an antibody constant region are known in the art. Antibody molecules s with altered function, e.g. altered affinity for an effector ligand, such as FcR on a cell, or the C1 component of complement can be produced by replacing at least one amino acid residue in the constant portion of the antibody with a different residue (see e.g., EP 388,151 A1, U.S. Pat. Nos. 5,624,821 and 5,648,260, the contents of all of which are hereby incorporated by reference) Amino acid mutations which stabilize antibody structure, such as S228P (EU nomenclature, S241P in Kabat nomenclature) in human IgG4 are also contemplated. Similar type of alterations could be described which if applied to the murine, or other species immunoglobulin would reduce or eliminate these functions.

[0569] In an embodiment, the only amino acids in the antibody molecule are canonical amino acids. In an embodiment, the antibody molecule comprises naturally-occurring amino acids; analogs, derivatives and congeners thereof; amino acid analogs having variant side chains; and/or all stereoisomers of any of any of the foregoing. The antibody molecule may comprise the D- or L-optical isomers of amino acids and peptidomimetics.

[0570] A polypeptide of an antibody molecule described herein may be linear or branched, it may comprise modified amino acids, and it may be interrupted by non-amino acids. The antibody molecule may also be modified; for example, by disulfide bond formation, glycosylation, lipidation, acetylation, phosphorylation, or any other manipulation, such as conjugation with a labeling component. The polypeptide can be isolated from natural sources, can be a produced by recombinant techniques from a eukaryotic or prokaryotic host, or can be a product of synthetic procedures.

[0571] The antibody molecule described herein can be used alone in unconjugated form, or can be bound to a substance, e.g., a toxin or moiety (e.g., a therapeutic drug; a compound emitting radiation; molecules of plant, fungal, or bacterial origin; or a biological protein (e.g., a protein toxin) or particle (e.g., a recombinant viral particle, e.g., via a viral coat protein). For example, the antibody molecule can be coupled to a radioactive isotope such as an α-, β-, or γ-emitter, or a β- and γ-emitter.

[0572] An antibody molecule can be derivatized or linked to another functional molecule (e.g., another peptide or protein). As used herein, a “derivatized” antibody molecule is one that has been modified. Methods of derivatization include but are not limited to the addition of a fluorescent moiety, a radionucleotide, a toxin, an enzyme or an affinity ligand such as biotin. Accordingly, the antibody molecules are intended to include derivatized and otherwise modified forms of the antibodies described herein, including immunoadhesion molecules. For example, an antibody molecule can be functionally linked (by chemical coupling, genetic fusion, noncovalent association or otherwise) to one or more other molecular entities, such as another antibody (e.g., a bispecific antibody or a diabody), a detectable agent, a toxin, a pharmaceutical agent, and/or a protein or peptide that can mediate association of the antibody or antibody portion with another molecule (such as a streptavidin core region or a polyhistidine tag).

[0573] Some types of derivatized antibody molecule are produced by crosslinking two or more antibodies (of the same type or of different types, e.g., to create bispecific antibodies). Suitable crosslinkers include those that are heterobifunctional, having two distinctly reactive groups separated by an appropriate spacer (e.g., m-maleimidobenzoyl-N-hydroxysuccinimide ester) or homobifunctional (e.g., disuccinimidyl suberate). Such linkers are available from Pierce Chemical Company, Rockford, Ill.

[0574] Useful detectable agents with which an anti-dengue antibody molecule may be derivatized (or labeled) to include fluorescent compounds, various enzymes, prosthetic groups, luminescent materials, bioluminescent materials, fluorescent emitting metal atoms, e.g., europium (Eu), and other anthanides, and radioactive materials (described below). Exemplary fluorescent detectable agents include fluorescein, fluorescein isothiocyanate, rhodamine, 5dimethylamine-1-napthalenesulfonyl chloride, phycoerythrin and the like. An antibody may also be derivatized with detectable enzymes, such as alkaline phosphatase, horseradish peroxidase, β-galactosidase, acetylcholinesterase, glucose oxidase and the like. When an antibody is derivatized with a detectable enzyme, it is detected by adding additional reagents that the enzyme uses to produce a detectable reaction product. For example, when the detectable agent horseradish peroxidase is present, the addition of hydrogen peroxide and diaminobenzidine leads to a colored reaction product, which is detectable. An antibody molecule may also be derivatized with a prosthetic group (e.g., streptavidin/biotin and avidin/biotin). For example, an antibody may be derivatized with biotin, and detected through indirect measurement of avidin or streptavidin binding. Examples of suitable fluorescent materials include umbelliferone, fluorescein, fluorescein isothiocyanate, rhodamine, dichlorotriazinylamine fluorescein, dansyl chloride or phycoerythrin; an example of a luminescent material includes luminol; and examples of bioluminescent materials include luciferase, luciferin, and aequorin.

[0575] Labeled antibody molecules can be used, for example, diagnostically and/or experimentally in a number of contexts, including (i) to isolate a predetermined antigen by standard techniques, such as affinity chromatography or immunoprecipitation; (ii) to detect a predetermined antigen (e.g., in a cellular lysate or cell supernatant) in order to evaluate the abundance and pattern of expression of the protein; (iii) to monitor protein levels in tissue as part of a clinical testing procedure, e.g., to determine the efficacy of a given treatment regimen.

[0576] An antibody molecule may be conjugated to another molecular entity, typically a label or a therapeutic (e.g., antimicrobial (e.g., antibacterial or bactericidal), immunomodulatory, immunostimulatory, cytotoxic, or cytostatic) agent or moiety. Radioactive isotopes can be used in diagnostic or therapeutic applications. Radioactive isotopes that can be coupled to the antibody molecules include, but are not limited to α-, β-, or γ-emitters, or β- and γ-emitters. Such radioactive isotopes include, but are not limited to iodine (¹³¹I or ¹²⁵I), yttrium (⁹⁰Y), lutetium (¹⁷⁷Lu), actinium (²²⁵Ac), praseodymium, astatine, (²¹¹At), rhenium (¹⁸⁶Re), bismuth (²¹²Bi or ²¹³Bi), indium (¹¹¹In), technetium (⁹⁹mTc), phosphorus (³²P), rhodium (¹⁸⁸Rh), sulfur (³⁵S), carbon (¹⁴C), tritium (³H), chromium (⁵¹Cr), chlorine (³⁶C1), cobalt (⁵⁷Co or ⁵⁸Co), iron (⁵⁹Fe), selenium (⁷⁵Se), or gallium (⁶⁷Ga). Radioisotopes useful as therapeutic agents include yttrium (⁹⁰Y), lutetium (¹⁷⁷Lu), actinium (²²⁵Ac), praseodymium, astatine (²¹¹At), rhenium (¹⁸⁶Re), bismuth (²¹²Bi or ²¹³Bi), and rhodium (¹⁸⁸Rh). Radioisotopes useful as labels, e.g., for use in diagnostics, include iodine (¹³¹I or ¹²⁵I), indium (¹¹¹In), technetium (⁹⁹mTc), phosphorus (³²P), carbon (¹⁴C), and tritium (³H), or one or more of the therapeutic isotopes listed above.

[0577] In an aspect, this disclosure provides a method of making an IL-2 complex described herein. The method includes, e.g., contacting an IL-2 variant described herein with an anti-IL-2 antibody molecule (e.g., an anti-IL-2 antibody molecule that binds to the IL-2 variant), to thereby producing the IL-2 complex. In an embodiment, the method further comprises evaluating the efficacy of the IL-2 complex in vitro, ex vivo, or in vivo.

[0578] This disclosure provides an isolated nucleic acid molecule encoding an IL-2 complex (or a portion thereof) described herein, and vectors and host cells thereof. The nucleic acid molecule includes, but is not limited to, RNA, genomic DNA and cDNA.

### IL-2 Conjugates

[0579] In an embodiment, the IL-2 agent comprises a conjugate, e.g., an IL-2 conjugate described herein.

[0580] In an embodiment, the IL-2 conjugate comprises an IL-2 variant described herein and a non-IL-2 moiety. In an embodiment, the IL-2 conjugate comprises one or more amino acid alterations (e.g., substitutions) described in Table 9. In an embodiment, the IL-2 conjugate comprises an amino acid sequence described in Table 9, or a functional fragment thereof. In an embodiment, the non-IL-2 moiety comprises an antibody molecule, e.g., an antibody molecule described herein. In an embodiment, the non-IL-2 moiety comprises a polymer, e.g., a polyether compound. In an embodiment, the polyether compound comprises polyethylene glycol (PEG). In an embodiment, the non-IL-2 moiety comprises a cytokine. The IL-2 variant can be coupled to the non-IL-2 moiety directly, or indirectly, e.g., through a linker. In an embodiment, the IL-2 conjugate is an IL-2 fusion protein.

[0581] In an embodiment, the IL-2 conjugate comprises an amino acid sequence chosen from: SEQ ID NO: 2, SEQ ID NO: 3, SEQ ID NO: 4, SEQ ID NO: 5, SEQ ID NO: 6, SEQ ID NO: 7, SEQ ID NO: 8, SEQ ID NO: 9, SEQ ID NO: 10, SEQ ID NO: 11, SEQ ID NO: 12, SEQ ID NO: 13, SEQ ID NO: 14, SEQ ID NO: 15, SEQ ID NO: 16, SEQ ID NO: 17, SEQ ID NO: 18, SEQ ID NO: 19, SEQ ID NO: 20, SEQ ID NO: 21, SEQ ID NO: 22, SEQ ID NO: 23, SEQ ID NO: 24, SEQ ID NO: 25, SEQ ID NO: 26, SEQ ID NO: 27, SEQ ID NO: 28, SEQ ID NO: 29, SEQ ID NO: 30, SEQ ID NO: 31, SEQ ID NO: 32, SEQ ID NO: 33, SEQ ID NO: 34, SEQ ID NO: 35, SEQ ID NO: 36, SEQ ID NO: 37, SEQ ID NO: 38, SEQ ID NO: 1000, SEQ ID NO: 1001, SEQ ID NO: 1002, or an amino acid sequence with at least 80%, 85%, 90%, 91%, 92%, 93%, 94%, 95%, 96%, 97%, 98%, 99%, or more sequence identity thereof, or differing by no more than 1, 2, 3, 4, 5, 6, 7, 8, 9, 10, 11, 12, 13, 14, 15, 20, 25, or 30 amino acids thereto.

[0582] In an embodiment, the IL-2 conjugate is an immunoconjugate, e.g., comprising an antibody molecule. In an embodiment, the IL-2 variant is coupled to the antibody molecule by a covalent bond. In an embodiment, the IL-2 variant is coupled to the antibody molecule by a peptide bond. In an embodiment, the IL-2 variant and the antibody molecule forms a fusion protein. In an embodiment, the fusion protein comprises a linker between the IL-2 variant and the antibody molecule (e.g., a heavy chain, a light chain, or both). In an embodiment, the IL-2 variant is coupled to the antibody molecule by a non-peptide bond. In an embodiment, the IL-2 variant is not coupled to the antibody molecule by a non-peptide bond.

[0583] In an embodiment, the IL-2 variant is coupled to the backbone of the antibody molecule. In another embodiment, the IL-2 variant is coupled to a side chain of the antibody molecule. In an embodiment, the antibody molecule is coupled to the backbone of the IL-2 variant. In an embodiment, the antibody molecule is coupled to a side-chain of the IL-2 variant.

[0584] In an embodiment, two or more (e.g., three, four, five, six, seven, eight, or more) IL-2 variants are coupled to the antibody molecule. In an embodiment, four IL-2 variants are coupled to the antibody molecule. For example, the IL-2 variants can be the same, or at least some of the IL-2 variants are different from each other. In an embodiment, the IL-2 variant is coupled to the antibody molecule in a bivalent manner. In another embodiment, the IL-2 variant is coupled to the antibody molecule in a tetravalent manner.

[0585] In an embodiment, the IL-2 conjugate is produced by enzymatic synthesis. For example, IL-2 conjugates can be produced by chemical synthesis of an IL-2 variant, expression of an antibody molecule, and enzymatic ligation of the IL-2 variant to the antibody molecule. In an embodiment, 90% or more, e.g., 92% or more, 95% or more, 97% or more, or 99% or more, reaction efficiency is achieved. In another embodiment, the method further comprises purifying the ADC. In an embodiment, the yield is 60% or more (e.g., 70% or more, 75% or more, 80% or more, 90% or more, or 95% or more) after purification.

[0586] In an aspect, the disclosure provides a combination of (a) an immunoconjugate comprising a first antibody molecule having a reduced effector function and an IL-2 variant described herein, and (b) a second antibody molecule having an increased effector function, for use in treating a disorder, e.g., a disorder described herein.

[0587] In an embodiment, the reduced effector function of the first antibody comprises reduced binding to an activating Fc receptor, reduced ADCC, reduced ADCP, reduced CDC, reduced cytokine secretion, or a combination thereof. In an embodiment, the reduced effector function is reduced binding to an activating Fc receptor, e.g., a human Fc receptor. In an embodiment, the activating Fc receptor is an Fey receptor. In an embodiment, the activating Fc receptor is FcγRIIIa, FcγRI, or FcγRIIa. In an embodiment, the reduced effector function comprises reduced ADCC. In an embodiment, the increased effector function comprises reduced binding to an activating Fc receptor and reduced ADCC.

[0588] In an embodiment, the first antibody molecule comprises one or more amino acid mutations (e.g., substitutions) in the Fc region as described herein. In an embodiment, the first antibody molecule comprises an amino acid substitution at position P329 of an immunoglobulin heavy chain. In an embodiment, the amino acid substitution comprises P329A or P329G, e.g., P329G. In an embodiment, the antibody molecule comprises a further amino acid substitution at a position of 5228, E233, L234, L235, N297, P331, or a combination thereof, of an immunoglobulin heavy chain. In an embodiment, the further amino acid substitution comprises S228P, E233P, L234A, L235A, L235E, N297A, N297D, P331S, or a combination thereof. In a particular embodiment the antibody comprises amino acid substitutions at positions P329, L234 and L235 of an immunoglobulin heavy chain. In an embodiment, the amino acid substitutions comprise L234A, L235A and P329G (LALA P329G).

[0589] In an embodiment, the first antibody molecule is directed to an antigen presented on a tumor cell or in a tumor cell environment. In an embodiment, the first antibody is directed to an antigen chosen from Fibroblast Activation Protein (FAP), the A1 domain of Tenascin-C(TNC A1), the A2 domain of Tenascin-C(TNC A2), the Extra Domain B of Fibronectin (EDB), Carcinoembryonic Antigen (CEA), and Melanoma-associated Chondroitin Sulfate Proteoglycan (MCSP).

[0590] In an embodiment the increased effector function of the second antibody molecule comprises increased binding to an activating Fc receptor, increased ADCC, increased ADCP, increased CDC, increased cytokine secretion, or a combination thereof. In an embodiment, the increased effector function comprises increased binding to an activating Fc receptor. In an embodiment, the activating Fc receptor is FcγRIIIa, FcγRI, or FcγRIIa. In an embodiment, the increased effector function comprises increased ADCC. In an embodiment, the increased effector function comprises increased binding to an activating Fc receptor and increased ADCC.

[0591] In an embodiment, the second antibody molecule comprises one or more amino acid mutations (e.g., substitutions) in the Fc region. In an embodiment, the second antibody molecule comprises a modification of the glycosylation in the Fc region. In an embodiment, the modification of the glycosylation in the Fc region comprises an increased proportion of non-fucosylated oligosaccharides in the Fc region (e.g., increased to at least 20%, 30%, 40%, 50%, 60%, 70%, 80%, or 90%) as compared to a non-modified antibody molecule. In an embodiment, the modification comprises an increased proportion of bisected oligosaccharides in the Fc region (e.g., increased to at least 20%, 30%, 40%, 50%, 60%, 70%, 80%, or 90%), as compared to a non-modified antibody molecule. In an embodiment, the modification of the glycosylation in the Fc region comprises an increased proportion of bisected, non-fucosylated oligosaccharides in the Fc region (e.g., increased to at least 20%, 30%, 40%, 50%, 60%, 70%, 80%, or 90%), as compared to a non-modified antibody molecule.

[0592] In an embodiment, the second antibody molecule is directed to an antigen presented on a tumor cell. In an embodiment, the second antibody molecule is directed to an antigen chosen from CD20, Epidermal Growth Factor Receptor (EGFR), HER2, HER3, Insulin-like Growth Factor 1 Receptor (IGF-1R), c-Met, CUB domain-containing protein-1 (CDCP1), Carcinoembryonic Antigen (CEA) and Melanoma-associated Chondroitin Sulfate Proteoglycan (MCSP).

[0593] In an embodiment, the disease is a disorder treatable by stimulation of effector cell function, e.g., a cancer. In an aspect, the disclosure provides a composition comprising: (a) an immunoconjugate comprising a first antibody molecule having a reduced effector function and an IL-2 variant described herein, (b) a second antibody molecule having an increased effector function, and (c) a pharmaceutically acceptable carrier.

### IL-2 Receptors

[0594] The IL-2 agents (e.g., IL-2 variants, IL-2 fusion proteins, IL-2 complexes, or IL-2 conjugates) described herein can bind to an IL-2 receptor (IL-2R) and/or modulate one or more functions associated with an IL-2R.

[0595] IL-2R is a heterotrimeric protein expressed on the surface of certain immune cells, such as lymphocytes, that binds and responds to IL-2. IL-2 receptor typically has three forms, generated by different combinations of three different chains: α (alpha) (also known as IL-2Rα, CD25, or Tac antigen), β (beta) (also known as IL-2Rβ, or CD122), and γ (gamma) (also known as IL-2Rγ, γc, common gamma chain, or CD132).

[0596] The IL-2R chains are expressed separately and differently on various cell types and can assemble in different combinations and orders to generate low, intermediate, and high affinity IL-2Rs. IL-2Rα binds IL-2 with low affinity; IL-2Rβ and IL-2Rγ together form a complex that binds IL-2 with intermediate affinity (e.g., on memory T cells and NK cells); and IL-2Rα, IL-2Rβ, and IL-2Rγ together form a complex that binds IL-2 with high affinity (e.g., on activated T cells and regulatory T cells).

[0597] IL-2Rβ and IL-2Rγ complex with Janus kinase 1 (JAK1) and Janus kinase 3 (JAK3), respectively. The binding of IL-2 to IL-2R can activate JAK1/JAK2 and initiate downstream intracellular signaling, e.g., the MAP kinase pathway, the Phosphoinositide 3-kinase (PI3K) pathway, or the JAK-STAT pathway (Liao et al., Curr Opin Immunol. 2011; 23(5): 598-604; Malek and Castro. Immunity. 2010; 33(2): 153-165).

[0598] IL-2R plays important roles in the immune system, tolerance and immunity. For example, the interaction between IL-2 and IL-2R is involved in promoting the differentiation of certain immature T cells into regulatory T cells, and the differentiation of T cells into effector T cells and into memory T cells. The interaction between IL-2 and IL-2R is also associated with autoimmune diseases, infections, and cell-mediated immunity.

[0599] In an aspect, the disclosure provides IL-2 agents comprising an IL-2 variant described herein that has an altered binding affinity to an IL-2R, e.g., one, two, or all of IL-2Rα, IL-2Rβ, or IL-2Rγ. For example, the IL-2 variant can have one or more (e.g., two, three, four, five, or more) amino acid alternations (e.g., substitutions or mutations) associated with the interaction between IL-2 and IL-2R, e.g., one, two, or all of IL-2Rα, IL-2Rβ, or IL-2Rγ.

[0600] In an embodiment, the IL-2 agent has an altered (e.g., reduced) binding affinity to IL-2Rα. In an embodiment, the binding affinity to IL-2Rα is reduced by about 10%, 20%, 30%, 40%, 50%, 60%, 70%, 80%, 90%, or more, relative to an IL-2 agent comprising a wild-type IL-2 or an IL-2 agent comprising a reference IL-2 variant. In an embodiment, the IL-2 agent has an altered (e.g., reduced) binding affinity to IL-2Rβ. In an embodiment, the binding affinity to IL-2Rβ is reduced by about 10%, 20%, 30%, 40%, 50%, 60%, 70%, 80%, 90%, or more, relative to an IL-2 agent comprising a wild-type IL-2 or an IL-2 agent comprising a reference IL-2 variant. In an embodiment, the IL-2 agent has an altered (e.g., reduced) binding affinity to IL-2Rγ. In an embodiment, the binding affinity to IL-2Rγ is reduced by about 10%, 20%, 30%, 40%, 50%, 60%, 70%, 80%, 90%, or more, relative to an IL-2 agent comprising a wild-type IL-2 or an IL-2 agent comprising a reference IL-2 variant.

[0601] In an embodiment, the IL-2 agent has an altered (e.g., reduced) binding affinity to IL-2Rα and an altered (e.g., reduced) binding affinity to IL-2Rβ. In an embodiment, the binding affinity to IL-2Rα is reduced by about 10%, 20%, 30%, 40%, 50%, 60%, 70%, 80%, 90%, or more, and the binding affinity to IL-2Rβ is reduced by about 10%, 20%, 30%, 40%, 50%, 60%, 70%, 80%, 90%, or more. In an embodiment, the binding affinities to IL-2Rα and IL-2Rβ are reduced by about 10%, 20%, 30%, 40%, 50%, 60%, 70%, 80%, 90%, or more, relative to an IL-2 agent comprising a wild-type IL-2 or an IL-2 agent comprising a reference IL-2 variant.

[0602] In an embodiment, the IL-2 agent has an altered (e.g., reduced) binding affinity to IL-2Rα and an altered (e.g., reduced) binding affinity to IL-2Rγ. In an embodiment, the binding affinity to IL-2Rα is reduced by about 10%, 20%, 30%, 40%, 50%, 60%, 70%, 80%, 90%, or more, and the binding affinity to IL-2Rγ is reduced by about 10%, 20%, 30%, 40%, 50%, 60%, 70%, 80%, 90%, or more. In an embodiment, the binding affinities to IL-2Rα and IL-2Rγ are reduced by about 10%, 20%, 30%, 40%, 50%, 60%, 70%, 80%, 90%, or more, relative to an IL-2 agent comprising a wild-type IL-2 or an IL-2 agent comprising a reference IL-2 variant.

[0603] In an embodiment, the IL-2 agent has an altered (e.g., reduced) binding affinity to IL-2Rβ and an altered (e.g., reduced) binding affinity to IL-2Rγ. In an embodiment, the binding affinity to IL-2Rβ is reduced by about 10%, 20%, 30%, 40%, 50%, 60%, 70%, 80%, 90%, or more, and the binding affinity to IL-2Rγ is reduced by about 10%, 20%, 30%, 40%, 50%, 60%, 70%, 80%, 90%, or more.

[0604] In an embodiment, the binding affinities to IL-2Rβ and IL-2Rγ are reduced by about 10%, 20%, 30%, 40%, 50%, 60%, 70%, 80%, 90%, or more, relative to an IL-2 agent comprising a wild-type IL-2 or an IL-2 agent comprising a reference IL-2 variant.

[0605] In an embodiment, the IL-2 agent has an altered (e.g., reduced) binding affinity to IL-2Rα, an altered (e.g., reduced) binding affinity to IL-2Rβ, and an altered (e.g., reduced) binding affinity to IL-2Rγ. In an embodiment, the binding affinity to IL-2Rα is reduced by about 10%, 20%, 30%, 40%, 50%, 60%, 70%, 80%, 90%, or more, the binding affinity to IL-2Rβ is reduced by about 10%, 20%, 30%, 40%, 50%, 60%, 70%, 80%, 90%, or more, and the binding affinity to IL-2Rγ is reduced by about 10%, 20%, 30%, 40%, 50%, 60%, 70%, 80%, 90%, or more. In an embodiment, the binding affinities to IL-2Rα, IL-2Rβ, and IL-2Rγ are reduced by about 10%, 20%, 30%, 40%, 50%, 60%, 70%, 80%, 90%, or more, relative to an IL-2 agent comprising a wild-type IL-2 or an IL-2 agent comprising a reference IL-2 variant.

[0606] In an embodiment, the binding affinity of an IL-2 agent provided by the disclosure to any of IL-2Rα, IL-2Rβ, or IL-2Rγ is reduced, but not abolished. For example, the reduction can range from about 10% to about 90%, e.g., from about 20% to about 80%, from about 30% to about 70%, from about 40% to about 60%, from about 10% to about 50%, or from about 50% to about 90%, relative to an IL-2 agent comprising a wild-type IL-2 or an IL-2 agent comprising a reference IL-2 variant.

### Fc Region

[0607] The present disclosure provides IL-2 agents (e.g., IL-2 variants, fusion polypeptides, complexes, or immunoconjugates) comprising an Fc region or a fragment thereof, e.g., an Fc region, or a fragment thereof (e.g., a functional fragment thereof), described herein.

[0608] In an embodiment, the IL-2 agent comprises an IL-2 variant described herein and an Fc region described herein. In an embodiment, the IL-2 agent further comprises a linker between the IL-2 variant and the Fc region. In an embodiment, the IL-2 agent comprises an IL-2 fusion protein comprising an Fc region described herein. In an embodiment, the Fc region comprises one or more mutations described herein.

[0609] A fragment crystallizable region, or Fc region, refers to a region of an immunoglobulin that interacts with an Fc receptor. In an embodiment, the Fc region interacts with a protein of the complement system. While without wishing to be bound by theory, it is believed that in an embodiment, the interaction between the Fc region with an Fc receptor, allows for activation of the immune system.

[0610] In IgG, IgA and IgD antibody isotypes, the naturally-occurring Fc region generally comprises two identical protein fragments, derived from the second and third constant domains of the antibody's two heavy chains. Naturally-occurring IgM and IgE Fc regions generally comprise three heavy chain constant domains (C_{H} domains 2-4) in each polypeptide chain. The Fc regions of IgGs can contain a highly conserved N-glycosylation site (Stadlmann et al. (2008). Proteomics 8 (14): 2858-2871; Stadlmann (2009) Proteomics 9 (17): 4143-4153). While not wishing to be bound by theory, it is believed that in an embodiment, glycosylation of the Fc fragment contributes to Fc receptor-mediated activities (Peipp et al. (2008) Blood 112 (6): 2390-2399). In an embodiment, the N-glycans attached to this site are predominantly core-fucosylated diantennary structures of the complex type. In another embodiment, small amounts of these N-glycans also contain bisecting GlcNAc and/or α-2,6 linked sialic acid residues.

[0611] An exemplary fragment of an Fc region amino acid sequence from human IgG1 is provided in SEQ ID NO: 40 and is shown below:

(SEQ ID NO: 40)
DKTHTCPPCPAPELLGGPSVFLFPPKPKDTLMISRTPEVTCVVVDVSHED
PEVKFNWYVDGVEVHNAKTKPREEQYGSTYRVVSVLTVL [symbol] QDWLNGKEYK
CKVSNKALPAPIEKTISKAKGQPREPQVYTLPPSRDELTKNQVSLTCLVK
GFYPSDIAVEWESNGQPENNYKTTPPVLDSDGSFFLYSKLTVDKSRWQQG
NVFSCSVMHEAL [symbol] N [symbol] YTQKSLSLSPGK

[0612] In SEQ ID NO: 40, the first amino acid residue in this sequence is referred to as position 221 herein. The three histidine residues shown in bold and underlined are positions 310, 433 and 435, respectively.

[0613] An IL-2 agent comprising an Fc region or fragment thereof (e.g., IL-2-Fc fusion protein) described herein can have one or more (e.g., 2, 3, 4, 5, 6, 7, 8, 9, 10, 11, 12, 13, 14, 15, 16, 17, 18, 19, 20, 21, 22, 23, 24, 25, or more) of mutations or combinations of mutations described in Table 1 (e.g., according to EU numbering).

TABLE 1
Exemplary Fc mutations

| Name | Mutation |
|---|---|
| FcMut001 | 1253M |
| FcMut002 | L309H_D312A_N315D |
| FcMut003 | L309N |
| FcMut004 | M252E_S254R |
| FcMut005 | M252E_S254R_R255Y |
| FcMut006 | S254H |
| FcMut007 | S254M |
| FcMut008 | T256D_T307R |
| FcMut009 | T256L_N286I_T307I |
| FcMut010 | T2561_N286I_T307I |
| FcMut011 | K248S_D376Q |
| FcMut012 | K248S_D376N |
| FcMut013 | D376Q_E380A |
| FcMut014 | D376N_E380A |
| FcMut015 | D376Q_M428L |
| FcMut016 | K248S_A378I |
| FcMut017 | L314K |
| FcMut018 | T250Q_M428L |
| FcMut019 | M428L_N434A |
| FcMut020 | N434A |
| FcMut021 | T307A_E380A_N434A |
| FcMut022 | M252W |
| FcMut023 | V308F |
| FcMut024 | V308F_N434Y |
| FcMut026 | T256D_T307R_D376N |
| FcMut027 | L309R_D312E |
| FcMut028 | L309R_Q311P_D312E |
| FcMut029 | K246N_P247A |
| FcMut030 | K246N_P247A_D376N |
| FcMut031 | T256E_T307R |
| FcMut032 | T256R_T307D |
| FcMut033 | T256R_T307E |
| FcMut034 | Q311P |
| FcMut035 | D376Q |
| FcMut036 | L234A_L235A |
| FcMut037 | L235V_G236A |
| FcMut038 | L234P_L235P |
| FcMut039 | L235P |
| FcMut040 | P329G |
| FcMut041 | P329E |
| FcMut042 | E233K |
| FcMut043 | T256D_N286D_A287S_T307R |
| FcMut044 | T256D_P257L_T307R |
| FcMut045 | T256D_T307R_Q311V |
| FcMut046 | P247D_T256D_T307R |
| FcMut047 | P247D_N286D_A287S_Q311V |
| FcMut048 | P257M_V308N |
| FcMut049 | V279I_Q311L_N315T |
| FcMut050 | M428L_N434S |
| FcMut051 | N434S |
| FcMut052 | H433G_N434P |
| FcMut053 | V259I_V308F_M428L |
| FcMut067 | T256D_N286D_T307R |
| FcMut068 | T256D_N286E_T307R |
| FcMut069 | T256D_N286Q_T307R |
| FcMut070 | T256D_P257T_T307R |
| FcMut071 | T256D_P257V_T307R |
| FcMut072 | T256D_T307R_Q311I |
| FcMut073 | T256D_T307R_Q311L |
| FcMut074 | T256D_T307R_Q311M |
| FcMut075 | T256D_P257L_N286D_T307R_Q311V |
| FcMut076 | T256D_T307R_M428L |
| FcMut077 | M428L |
| FcMut078 | M252Y_S254T_T256Q |
| FcMut079 | M252Y_S254T_T256E_K288E |
| FcMut080 | T256K_K288E |
| FcMut081 | T256D_E258T |
| FcMut082 | E283Q_H285E |
| FcMut083 | R344D_D401R |
| FcMut084 | K248E_E380K |
| FcMut085 | K248E_E380R |
| FcMut086 | K246H |
| FcMut087 | K248H |
| FcMut088 | T250I |
| FcMut089 | T250V |
| FcMut090 | L251F |
| FcMut091 | L251M |
| FcMut093 | P257V |
| FcMut094 | N276D |
| FcMut095 | H285N |
| FcMut096 | H285D |
| FcMut097 | K288H |
| FcMut098 | K288Q |
| FcMut099 | K288E |
| FcMut100 | T307E |
| FcMut101 | T307Q |
| FcMut102 | V308P |
| FcMut103 | V308I |
| FcMut104 | V308L |
| FcMut105 | L309H |
| FcMut106 | L309M |
| FcMut107 | Q311H |
| FcMut108 | L314F |
| FcMut109 | Y319H |
| FcMut110 | I336T |
| FcMut111 | P343D |
| FcMut112 | P343V |
| FcMut113 | E345Q |
| FcMut114 | P346V |
| FcMut115 | P374T |
| FcMut116 | D376N |
| FcMut117 | A378S |
| FcMut118 | A431T |
| FcMut119 | A431P |
| FcMut120 | A431G |
| FcMut121 | L432V |
| FcMut122 | L432I |
| FcMut123 | L432Q |
| FcMut124 | N434T |
| FcMut125 | H435N |
| FcMut126 | Y436H |
| FcMut127 | K439Q |
| FcMut128 | T256D |
| FcMut129 | T307R |
| FcMut130 | A378T |
| FcMut131 | A378D |
| FcMut132 | A378H |
| FcMut133 | A378Y |
| FcMut134 | A378V |
| FcMut135 | D376R |
| FcMut136 | D376F |
| FcMut137 | D376W |
| FcMut138 | L314H |
| FcMut139 | L432E_T437Q |
| FcMut140 | D376Q_A378T |
| FcMut141 | D376Q_I377M_A378T |
| FcMut142 | P244Q_D376Q |
| FcMut143 | P247T_A378T |
| FcMut144 | P247N_A378T |
| FcMut145 | T256D_T307R_L309T |
| FcMut146 | A339T_S375E_F404Y |
| FcMut147 | L235V_G236A_T256D_T307R |
| FcMut148 | L235V_G236A_D376Q_M428L |
| FcMut149 | L314N |
| FcMut150 | N315D |
| FcMut151 | A378T |
| FcMut152 | T437Q |
| FcMut153 | L432E |
| FcMut154 | Y436R |
| FcMut155 | L314M |
| FcMut156 | L234A_L235A_T256D_T307R_Q311V |
| FcMut157 | L234A_L235A_T256D_P257V_T307R |
| FcMut158 | L234A_L235A_T256D_P257L_N286D_ |
| | T307R_Q311V |
| FcMut159 | L235V_G236A_T256D_T307R_Q311V |
| FcMut160 | L235V_G236A_T256D_P257V_T307R |
| FcMut161 | L235V_G236A_T256D_P257L_N286D_ |
| | T307R_Q311V |
| FcMut162 | S267T_A327N_A330M |
| FcMut163 | S267T_A327N |
| FcMut164 | L235V_G236A_S267T_A327N_A330M |
| FcMut165 | L235V_G236A_S267T_A327N |
| FcMut166 | M252Y_S254T |
| FcMut167 | T256E |
| FcMut168 | G236A_I332E |
| FcMut169 | S239D_I332E |
| FcMut170 | G236A_S239D_I332E |
| FcMut171 | T256D_N286D_T307R_Q311V |
| FcMut172 | T256D_E258T_T307R |
| FcMut173 | T256D_E258T_T307R_Q311V |
| FcMut174 | T256D_P257V_E258T_T307R |
| FcMut175 | T256D_P257L_E258T_N286D_T307R_Q311V |
| FcMut176 | T256D_E258T_N286D_T307R_Q311V |
| FcMut177 | A378V_M428L |
| FcMut178 | A378V_M428I |
| FcMut179 | A378V_M428V |
| FcMut180 | T256D_N286D |
| FcMut181 | T256D_A378V |
| FcMut182 | T256D_Q311V |
| FcMut183 | T256D_Q311V_A378V |
| FcMut184 | T256D_T307R_A378V |
| FcMut185 | T256D_N286D_T307R_A378V |
| FcMut186 | T256D_T307R_Q311V_A378V |
| FcMut187 | H285D_A378V |
| FcMut188 | H285D_Q311V |
| FcMut189 | T256D_H285D |
| FcMut190 | T256D_H285D_Q311V |
| FcMut191 | T256D_H285D_T307R |
| FcMut192 | T256D_H285D_T307R_A378V |
| FcMut193 | H285D_L314M_A378V |
| FcMut194 | T256D_E258T_H285D_Q311H |
| FcMut195 | T256D_E258T_H285D |
| FcMut196 | H285D_N315D |
| FcMut197 | H285N_T307Q_N315D |
| FcMut198 | H285D_L432E_T437Q |
| FcMut199 | T256D_E258T_N315D |
| FcMut200 | P257V_H285N |
| FcMut201 | H285N_L432F |
| FcMut202 | H285N_T437I |
| FcMut203 | T256D_E258T_L314M |
| FcMut204 | T256D_E258T_T307Q |
| FcMut205 | T256D_E258T_A378V |
| FcMut206 | V308P_A378V |
| FcMut207 | P257V_A378T |
| FcMut208 | P257V_V308P_A378V |
| FcMut209 | N315D_A378T |
| FcMut210 | H285N_L314M |
| FcMut211 | L314M_L432E_T437Q |
| FcMut212 | T307Q_N315D |
| FcMut213 | H285D_T307Q_A378V |
| FcMut214 | L314M_N315D |
| FcMut215 | T307Q_Q311V_A378V |
| FcMut216 | H285D_Q311V_A378V |
| FcMut217 | Q311V_N315D_A378V |
| FcMut218 | T256D_E258T_Q311V |
| FcMut219 | T256D_N315D_A378V |
| FcMut220 | T256D_Q311V_N315D |
| FcMut221 | T256D_T307Q_A378V |
| FcMut222 | T256D_T307Q_Q311V |
| FcMut223 | T256D_H285D_A378V |
| FcMut224 | T256D_H285D_T307R_Q311V |
| FcMut225 | T256D_H285D_N286D_T307R |
| FcMut226 | T256D_H285D_N286D_T307R_Q311V |
| FcMut227 | T256D_H285D_N286D_T307R_A378V |
| FcMut228 | T256D_N286D_T307R_Q311V_A378V |
| FcMut229 | T256D_H285D_T307R_Q311V_A378V |
| FcMut230 | V308P_Q311V_A378V |
| FcMut231 | T256D_V308P_A378V |
| FcMut232 | T256D_V308P_Q311V |
| FcMut233 | T256D_E258T_V308P |
| FcMut234 | H285D_V308P_Q311V |
| FcMut242 | E258T |
| FcMut243 | N286D |
| FcMut244 | Q311V |
| YTE | M252Y_S254T_T256E |

[0614] In an embodiment, the Fc region comprises FcMut001. In an embodiment, the Fc region comprises FcMut002. In an embodiment, the Fc region comprises FcMut003. In an embodiment, the Fc region comprises FcMut004. In an embodiment, the Fc region comprises FcMut005. In an embodiment, the Fc region comprises FcMut006. In an embodiment, the Fc region comprises FcMut007. In an embodiment, the Fc region comprises FcMut008. In an embodiment, the Fc region comprises FcMut009. In an embodiment, the Fc region comprises FcMut010. In an embodiment, the Fc region comprises FcMut011. In an embodiment, the Fc region comprises FcMut012. In an embodiment, the Fc region comprises FcMut013. In an embodiment, the Fc region comprises FcMut014. In an embodiment, the Fc region comprises FcMut015. In an embodiment, the Fc region comprises FcMut016. In an embodiment, the Fc region comprises FcMut017. In an embodiment, the Fc region comprises FcMut018. In an embodiment, the Fc region comprises FcMut019. In an embodiment, the Fc region comprises FcMut020. In an embodiment, the Fc region comprises FcMut021. In an embodiment, the Fc region comprises FcMut022. In an embodiment, the Fc region comprises FcMut023. In an embodiment, the Fc region comprises FcMut024. In an embodiment, the Fc region comprises FcMut026. In an embodiment, the Fc region comprises FcMut027. In an embodiment, the Fc region comprises FcMut028. In an embodiment, the Fc region comprises FcMut029. In an embodiment, the Fc region comprises FcMut030. In an embodiment, the Fc region comprises FcMut031. In an embodiment, the Fc region comprises FcMut032. In an embodiment, the Fc region comprises FcMut033. In an embodiment, the Fc region comprises FcMut034. In an embodiment, the Fc region comprises FcMut035. In an embodiment, the Fc region comprises FcMut036. In an embodiment, the Fc region comprises FcMut037. In an embodiment, the Fc region comprises FcMut038. In an embodiment, the Fc region comprises FcMut039. In an embodiment, the Fc region comprises FcMut040. In an embodiment, the Fc region comprises FcMut041. In an embodiment, the Fc region comprises FcMut042. In an embodiment, the Fc region comprises FcMut043. In an embodiment, the Fc region comprises FcMut044. In an embodiment, the Fc region comprises FcMut045. In an embodiment, the Fc region comprises FcMut046. In an embodiment, the Fc region comprises FcMut047. In an embodiment, the Fc region comprises FcMut048. In an embodiment, the Fc region comprises FcMut049. In an embodiment, the Fc region comprises FcMut050. In an embodiment, the Fc region comprises FcMut051. In an embodiment, the Fc region comprises FcMut052. In an embodiment, the Fc region comprises FcMut053. In an embodiment, the Fc region comprises FcMut067. In an embodiment, the Fc region comprises FcMut068. In an embodiment, the Fc region comprises FcMut069. In an embodiment, the Fc region comprises FcMut070. In an embodiment, the Fc region comprises FcMut071. In an embodiment, the Fc region comprises FcMut072. In an embodiment, the Fc region comprises FcMut073. In an embodiment, the Fc region comprises FcMut074. In an embodiment, the Fc region comprises FcMut075. In an embodiment, the Fc region comprises FcMut076. In an embodiment, the Fc region comprises FcMut077. In an embodiment, the Fc region comprises FcMut078. In an embodiment, the Fc region comprises FcMut079. In an embodiment, the Fc region comprises FcMut080. In an embodiment, the Fc region comprises FcMut081. In an embodiment, the Fc region comprises FcMut082. In an embodiment, the Fc region comprises FcMut083. In an embodiment, the Fc region comprises FcMut084. In an embodiment, the Fc region comprises FcMut085. In an embodiment, the Fc region comprises FcMut086. In an embodiment, the Fc region comprises FcMut087. In an embodiment, the Fc region comprises FcMut088. In an embodiment, the Fc region comprises FcMut089. In an embodiment, the Fc region comprises FcMut090. In an embodiment, the Fc region comprises FcMut091. In an embodiment, the Fc region comprises FcMut093. In an embodiment, the Fc region comprises FcMut094. In an embodiment, the Fc region comprises FcMut095. In an embodiment, the Fc region comprises FcMut096. In an embodiment, the Fc region comprises FcMut097. In an embodiment, the Fc region comprises FcMut098. In an embodiment, the Fc region comprises FcMut099. In an embodiment, the Fc region comprises FcMut100. In an embodiment, the Fc region comprises FcMut101. In an embodiment, the Fc region comprises FcMut102. In an embodiment, the Fc region comprises FcMut103. In an embodiment, the Fc region comprises FcMut104. In an embodiment, the Fc region comprises FcMut105. In an embodiment, the Fc region comprises FcMut106. In an embodiment, the Fc region comprises FcMut107. In an embodiment, the Fc region comprises FcMut108. In an embodiment, the Fc region comprises FcMut109. In an embodiment, the Fc region comprises FcMut110. In an embodiment, the Fc region comprises FcMut111. In an embodiment, the Fc region comprises FcMut112. In an embodiment, the Fc region comprises FcMut113. In an embodiment, the Fc region comprises FcMut114. In an embodiment, the Fc region comprises FcMut115. In an embodiment, the Fc region comprises FcMut116. In an embodiment, the Fc region comprises FcMut117. In an embodiment, the Fc region comprises FcMut118. In an embodiment, the Fc region comprises FcMut119. In an embodiment, the Fc region comprises FcMut120. In an embodiment, the Fc region comprises FcMut121. In an embodiment, the Fc region comprises FcMut122. In an embodiment, the Fc region comprises FcMut123. In an embodiment, the Fc region comprises FcMut124. In an embodiment, the Fc region comprises FcMut125. In an embodiment, the Fc region comprises FcMut126. In an embodiment, the Fc region comprises FcMut127. In an embodiment, the Fc region comprises FcMut128. In an embodiment, the Fc region comprises FcMut129. In an embodiment, the Fc region comprises FcMut130. In an embodiment, the Fc region comprises FcMut131. In an embodiment, the Fc region comprises FcMut132. In an embodiment, the Fc region comprises FcMut133. In an embodiment, the Fc region comprises FcMut134. In an embodiment, the Fc region comprises FcMut135. In an embodiment, the Fc region comprises FcMut136. In an embodiment, the Fc region comprises FcMut137. In an embodiment, the Fc region comprises FcMut138. In an embodiment, the Fc region comprises FcMut139. In an embodiment, the Fc region comprises FcMut140. In an embodiment, the Fc region comprises FcMut141. In an embodiment, the Fc region comprises FcMut142. In an embodiment, the Fc region comprises FcMut143. In an embodiment, the Fc region comprises FcMut144. In an embodiment, the Fc region comprises FcMut145. In an embodiment, the Fc region comprises FcMut146. In an embodiment, the Fc region comprises FcMut147. In an embodiment, the Fc region comprises FcMut148. In an embodiment, the Fc region comprises FcMut149. In an embodiment, the Fc region comprises FcMut150. In an embodiment, the Fc region comprises FcMut151. In an embodiment, the Fc region comprises FcMut152. In an embodiment, the Fc region comprises FcMut153. In an embodiment, the Fc region comprises FcMut154. In an embodiment, the Fc region comprises FcMut155. In an embodiment, the Fc region comprises FcMut156. In an embodiment, the Fc region comprises FcMut157. In an embodiment, the Fc region comprises FcMut158. In an embodiment, the Fc region comprises FcMut159. In an embodiment, the Fc region comprises FcMut160. In an embodiment, the Fc region comprises FcMut161. In an embodiment, the Fc region comprises FcMut162. In an embodiment, the Fc region comprises FcMut163. In an embodiment, the Fc region comprises FcMut164. In an embodiment, the Fc region comprises FcMut165. In an embodiment, the Fc region comprises FcMut166. In an embodiment, the Fc region comprises FcMut167. In an embodiment, the Fc region comprises FcMut168. In an embodiment, the Fc region comprises FcMut169. In an embodiment, the Fc region comprises FcMut170. In an embodiment, the Fc region comprises FcMut171. In an embodiment, the Fc region comprises FcMut172. In an embodiment, the Fc region comprises FcMut173. In an embodiment, the Fc region comprises FcMut174. In an embodiment, the Fc region comprises FcMut175. In an embodiment, the Fc region comprises FcMut176. In an embodiment, the Fc region comprises FcMut177. In an embodiment, the Fc region comprises FcMut178. In an embodiment, the Fc region comprises FcMut179. In an embodiment, the Fc region comprises FcMut180. In an embodiment, the Fc region comprises FcMut181. In an embodiment, the Fc region comprises FcMut182. In an embodiment, the Fc region comprises FcMut183. In an embodiment, the Fc region comprises FcMut184. In an embodiment, the Fc region comprises FcMut185. In an embodiment, the Fc region comprises FcMut186. In an embodiment, the Fc region comprises FcMut187. In an embodiment, the Fc region comprises FcMut188. In an embodiment, the Fc region comprises FcMut189. In an embodiment, the Fc region comprises FcMut190. In an embodiment, the Fc region comprises FcMut191. In an embodiment, the Fc region comprises FcMut192. In an embodiment, the Fc region comprises FcMut193. In an embodiment, the Fc region comprises FcMut194. In an embodiment, the Fc region comprises FcMut195. In an embodiment, the Fc region comprises FcMut196. In an embodiment, the Fc region comprises FcMut197. In an embodiment, the Fc region comprises FcMut198. In an embodiment, the Fc region comprises FcMut199. In an embodiment, the Fc region comprises FcMut200. In an embodiment, the Fc region comprises FcMut201. In an embodiment, the Fc region comprises FcMut202. In an embodiment, the Fc region comprises FcMut203. In an embodiment, the Fc region comprises FcMut204. In an embodiment, the Fc region comprises FcMut205. In an embodiment, the Fc region comprises FcMut206. In an embodiment, the Fc region comprises FcMut207. In an embodiment, the Fc region comprises FcMut208. In an embodiment, the Fc region comprises FcMut209. In an embodiment, the Fc region comprises FcMut210. In an embodiment, the Fc region comprises FcMut211. In an embodiment, the Fc region comprises FcMut212. In an embodiment, the Fc region comprises FcMut213. In an embodiment, the Fc region comprises FcMut214. In an embodiment, the Fc region comprises FcMut215. In an embodiment, the Fc region comprises FcMut216. In an embodiment, the Fc region comprises FcMut217. In an embodiment, the Fc region comprises FcMut218. In an embodiment, the Fc region comprises FcMut219. In an embodiment, the Fc region comprises FcMut220. In an embodiment, the Fc region comprises FcMut221. In an embodiment, the Fc region comprises FcMut222. In an embodiment, the Fc region comprises FcMut223. In an embodiment, the Fc region comprises FcMut224. In an embodiment, the Fc region comprises FcMut225. In an embodiment, the Fc region comprises FcMut226. In an embodiment, the Fc region comprises FcMut227. In an embodiment, the Fc region comprises FcMut228. In an embodiment, the Fc region comprises FcMut229. In an embodiment, the Fc region comprises FcMut230. In an embodiment, the Fc region comprises FcMut231. In an embodiment, the Fc region comprises FcMut232. In an embodiment, the Fc region comprises FcMut233. In an embodiment, the Fc region comprises FcMut234. In an embodiment, the Fc region comprises FcMut242. In an embodiment, the Fc region comprises FcMut243. In an embodiment, the Fc region comprises FcMut244.

[0615] In an embodiment, the Fc region comprises one or more (e.g., 2, 3, 4, 5, 6, 7, 8, 9, or more) of mutations or combinations of mutations chosen from FcMut045, FcMut171, FcMut183, FcMut186, FcMut190, FcMut197, FcMut213, FcMut215, FcMut216, FcMut219, FcMut222, FcMut223, FcMut224, FcMut226, FcMut227, FcMut228, or FcMut229. In an embodiment, the Fc region comprises one or more (e.g., 2, 3, 4, 5, 6, or all) of mutations or combinations of mutations chosen from FcMut045, FcMut183, FcMut197, FcMut213, FcMut215, FcMut228, or FcMut156. In another embodiment, the Fc region comprises one or more (e.g., 2, 3, 4, 5, or all) of mutations or combinations of mutations chosen from FcMut183, FcMut197, FcMut213, FcMut215, FcMut228, or FcMut229.

[0616] In an embodiment, the Fc region does not comprise one or more (e.g., 2, 3, 4, or all) of mutations or combinations of mutations chosen from FcMut018, FcMut021, FcMut050, FcMut102, or YTE. In an embodiment, the Fc region comprises one or more (e.g., 2, 3, 4, or all) of mutations or combinations of mutations chosen from FcMut018, FcMut021, FcMut050, FcMut102, or YTE, and one or more other mutations or combinations of mutations described in Table 1.

[0617] In an embodiment, the Fc region comprises one or more (e.g., 2, 3, 4, 5, 6, 7, 8, 9, 10, 11, 12, 13, 14, 15, 16, 17, 18, 19, 20, or more) of mutations or combinations of mutations described in Table 1 that result in a synergistic effect (e.g., binding affinity or circulating half-life) as described herein.

[0618] In an embodiment, the Fc region comprises one or more (e.g., 2, 3, 4, 5, 6, or 7) mutations in residues chosen from T256, H285, N286, T307, Q311, N315, or A378. In an embodiment, the Fc region comprises one or more (e.g., 2, 3, 4, 5, 6, or 7) mutations chosen from T256D, H285N, N286D, T307Q, Q311V, N315D, or A378V.

[0619] In an embodiment, the Fc region comprises a half-life enhancing mutation, a mutation that is capable of disrupting an Fc effector function, or both. In an embodiment, the Fc region comprises one or more mutations or combinations of mutations described herein, e.g., chosen from M252W, V308F/N434Y, R255Y, P257L/N434Y, V308F, P257N/M252Y, G385N, P257N/V308Y, N434Y, M252Y/S254T/T256E (“YTE”), M428L/N434S (“LS”), or any combination thereof. Alternatively, or additionally, in an embodiment, the Fc region comprises (a) one or more (e.g., 2, 3, 4, 5, or all) combinations of mutations chosen from: T256D/Q311V/A378V, H285N/T307Q/N315D, H285D/T307Q/A378V, T307Q/Q311V/A378V, T256D/N286D/T307R/Q311V/A378V, or T256D/T307R/Q311V; (b) a mutation or a combination of mutations capable of disrupting an Fc effector function, e.g., N297G, L234A/L235A (also known as “LALA” mutation), L234A/L235A/P329G (also known as “LALAPG” mutation), or (c) both (a) and (b).

[0620] In an embodiment, the Fc region comprises mutations T256D/Q311V/A378V and a mutation or a combination of mutations capable of disrupting an Fc effector function, e.g., L234A/L235A. In an embodiment, the Fc region comprises mutations H285N/T307Q/N315D and a mutation or a combination of mutations capable of disrupting an Fc effector function, e.g., L234A/L235A. In an embodiment, the Fc region comprises mutations H285D/T307Q/A378V and a mutation or a combination of mutations capable of disrupting an Fc effector function, e.g., L234A/L235A. In an embodiment, the Fc region comprises mutations T307Q/Q311V/A378V and a mutation or a combination of mutations capable of disrupting an Fc effector function, e.g., L234A/L235A. In an embodiment, the Fc region comprises mutations T256D/N286D/T307R/Q311V/A378V and a mutation or a combination of mutations capable of disrupting an Fc effector function, e.g., L234A/L235A. In an embodiment, the Fc region comprises mutations T256D/T307R/Q311V and a mutation or a combination of mutations capable of disrupting an Fc effector function, e.g., L234A/L235A. Other exemplary Fc mutations are described, e.g., in International Application Publication No. WO2018/052556, U.S. Application Publication No. US2018/0037634, and Booth et al. MAbs. 2018; 10(7): 1098-1110, the contents of which are incorporated by reference in their entirety.

[0621] In an embodiment the Fc region comprises the Fc region of human IgG1, e.g., human IgG1 m3 allotype. In an embodiment, the Fc region comprises the mutation N297G. In an embodiment, the Fc region comprises the Fc region of human IgG1 allotype m3, human IgG1 allotype m3 comprising the mutation N297G and/or other mutations of the Fc region of human IgG1 allotype m3, or a fragment thereof. In an embodiment, the Fc region comprises the sequence of SEQ ID NO: 1003, or an amino acid sequence with at least 80%, 85%, 90%, 91%, 92%, 93%, 94%, 95%, 96%, 97%, 98%, 99%, or more sequence identity thereof, or differing by no more than 1, 2, 3, 4, 5, 6, 7, 8, 9, 10, 11, 12, 13, 14, 15, 20, 25, or 30 amino acids thereto.

[0622] Any of the mutations in the Fc region that extend half-life described herein can be used in combination with any Fc mutation capable of enhancing or disrupting an Fc effector function.

[0623] In an embodiment the Fc region comprises the Fc region of human IgG4, human IgG4 containing S228P mutation, and/or R409K mutation, and/or other mutations of the Fc region of human IgG4, or a fragment thereof. An exemplary fragment of an Fc region amino acid sequence from human IgG4 is provided in SEQ ID NO: 44 and is shown below:

(SEQ ID NO: 44)
E₂₁₉SKYGPPCP [symbol] CPAPEFLGGPSV₂₄₀FLFPPEPEDT₂₅₀LMISRT
PEVT₂₆₀CVVVDVSQED₂₇₀PEVQFNWYVD₂₈₀GVEVHNAKTK₂₉₀PREE
QFNSTY₃₀₀RVVSVL [symbol] VLH [symbol] DWLNGKEYK₃₂₀CKVSNEGLPS₃₃₀
SIEKTISKAK₃₄₀GQPREPQVYT₃₅₀LPPSQEEMTK₃₆₀NQVSLTCLVK₃₇₀
GFYPSDI [symbol] VEWESNGQPENNYKTTPPVLDSDGSFFLYSRLTVDKSRW
QEGNVFSCSVMHEALHNHYTQKSLSLSLGK

[0624] In SEQ ID NO: 44, the first amino acid residue in this sequence is referred to as position 219 herein. Mutations described to extend the half-life of human IgG1 can be applied to human IgG4 Fc. For example, Mut215 corresponds to mutations T307Q/Q311V/A378V in SEQ ID NO: 44.

[0625] The Fc region can bind to various cell receptors (e.g., Fc receptors) and complement proteins. The Fc region can also mediate different physiological effects of antibody molecules, e.g., detection of opsonized particles; cell lysis; degranulation of mast cells, basophils, and eosinophils; and other processes.

[0626] There are several different types of Fc receptors (FcR), which can be classified based on the type of antibody that they recognize.

[0627] Fcγ receptors (FcγR) belong to the immunoglobulin superfamily, and are involved, e.g., in inducing phagocytosis of opsonized microbes. This family includes several members, FcγRI (CD64), FcγRIIA (CD32), FcγRIIB (CD32), FcγRIIIA (CD16a), FcγRIIIB (CD16b), which differ in their antibody affinities due to their different molecular structure. For instance, FcγRI can bind to IgG more strongly than FcγRII or FcγRIII does. FcγRI also has an extracellular portion comprising three immunoglobulin (Ig)-like domains, one more domain than FcγRII or FcγRIII has. This property allows FcγRI to bind a sole IgG molecule (or monomer), but Fcγ receptors generally need to bind multiple IgG molecules within an immune complex to be activated.

[0628] The Fcγ receptors differ in their affinity for IgG and the different IgG subclasses can have unique affinities for each of the Fcγ receptors. These interactions can be further tuned by the glycan (oligosaccharide) at certain position of IgG. For example, by creating steric hindrance, fucose containing CH2-84.4 glycans reduce IgG affinity for FcγRIIIA, whereas GO glycans, which lack galactose and terminate instead with GlcNAc moieties, have increased affinity for FcγRIIIA (Maverakis et al. (2015) Journal of Autoimmunity 57 (6): 1-13).

[0629] The neonatal Fc receptor (FcRn) is expressed on multiple cell types and is similar in structure to MHC class I. This receptor also binds IgG and is involved in preservation of this antibody (Zhu et al. (2001). Journal of Immunology 166 (5): 3266-76). FcRn is also involved in transferring IgG from a mother either via the placenta to her fetus or in milk to her suckling infant. This receptor may also play a role in the homeostasis of IgG serum levels.

[0630] FcαRI (or CD89) belongs to the FcαR subgroup. FcαRI is found on the surface of neutrophils, eosinophils, monocytes, macrophages (including Kupffer cells), and dendritic cells. It comprises two extracellular Ig-like domains and is a member of both the immunoglobulin superfamily and the multi-chain immune recognition receptor (MIRR) family. It signals by associating with two FcRγ signaling chains.

[0631] Fc-alpha/mu receptor (Fcα/μR) is a type I transmembrane protein. It can bind IgA, although it has higher affinity for IgM (Shibuya and Honda (2006) Springer Seminars in Immunopathology 28 (4): 377-82). With one Ig-like domain in its extracellular portion, this Fc receptor is also a member of the immunoglobulin superfamily.

[0632] There are two known types of FcεR. The high-affinity receptor FcεRI is a member of the immunoglobulin superfamily (it has two Ig-like domains). FcεRI is found on epidermal Langerhans cells, eosinophils, mast cells and basophils. This receptor can play a role in controlling allergic responses. FcεRI is also expressed on antigen-presenting cells, and controls the production of immune mediators, e.g., cytokines that promote inflammation (von Bubnoff et al. (2003) Clinical and Experimental Dermatology 28 (2): 184-7). The low-affinity receptor FcεRII (CD23) is a C-type lectin. FcεRII has multiple functions as a membrane-bound or soluble receptor. It can also control B cell growth and differentiation and blocks IgE-binding of eosinophils, monocytes, and basophils (Kikutani et al. (1989) Ciba Foundation Symposium 147: 23-31).

[0633] In an embodiment, the Fc region can be engineered to contain an antigen-binding site to generate an Fcab fragment (Wozniak-Knopp et al. (2010) Protein Eng Des 23 (4): 289-297). Fcab fragments can be inserted into a full immunoglobulin by swapping the Fc region, thus obtaining a bispecific antibody (with both Fab and Fcab regions containing distinct binding sites).

[0634] The binding and recycling of FcRn can be illustrated below. For example, IgG and albumin are internalized into vascular endothelial cells through pinocytosis. The pH of the endosome is 6.0, facilitating association with membrane-bound FcRn. The contents of endosomes can be processed in one of two ways: either recycling back to the apical cell membrane or transcytosis from the apical to the basolateral side. IgG not associated with FcRn is degraded by lysosomes.

[0635] While not wishing to be bound by theory, it is believed that FcRn interaction with IgG is mediated through Fc. The binding of Fc to FcRn is pH specific, e.g., no significant binding at pH 7.4 and strong binding in acidic environment. Structure of FcRn in complex with Fc domain of IgG1 molecule is described, e.g., in FIG. 1 of International Application Publication No. WO2018/052556 or U.S. Application Publication No. US2018/0037634. Each FcRn molecule generally binds to an Fc-monomer. In an embodiment, Fab domains can also influence binding of IgG to FcRn, e.g., have either a negative or no influence on the affinity of the IgG for FcRn.

[0636] There can be multiple considerations when an Fc region is engineered to enhance half-life of a polypeptide. For example, prolonging half-life and efficient recirculation of antibody molecules or fusion proteins often requires pH specific affinity enhancement (e.g., only at low pH of the endosome). FcRn binds proximal to the linker region between CH2 and CH3 domains of a Fc region. Modifications to the linker can impact Fc engagement with Fcγ receptors. Modifications on the Fc region can impact thermal stability and aggregation properties of the polypeptide.

### Pharmaceutical Compositions and Kits

[0637] The present disclosure provides compositions, e.g., pharmaceutical compositions, which include an IL-2 agent described herein, and optionally a pharmaceutically acceptable carrier.

[0638] As used herein, “pharmaceutically acceptable carrier” includes any and all solvents, dispersion media, isotonic and absorption delaying agents, and the like that are physiologically compatible. The carrier can be suitable for intravenous, intramuscular, subcutaneous, parenteral, rectal, spinal or epidermal administration (e.g., by injection or infusion). In an embodiment, less than about 5%, e.g., less than about 4%, 3%, 2%, or 1% of the IL-2 agents in the composition are present as aggregates. In an embodiment, at least about 95%, e.g., at least about 96%, 97%, 98%, 98.5%, 99%, 99.5%, 99.8%, or more of the IL-2 agents in the composition are present as monomers. In an embodiment, at least about 95%, e.g., at least about 96%, 97%, 98%, 98.5%, 99%, 99.5%, 99.8%, or more of the IL-2 agents in the composition are present as dimers. In an embodiment, the level of aggregates, dimers, or monomers is determined by chromatography, e.g., high performance liquid chromatography size exclusion chromatography (HPLC-SEC). In an embodiment, the IL-2 agent is formulated together with the pharmaceutically acceptable carrier.

[0639] The compositions set out herein may be in a variety of forms. These include, for example, liquid, semi-solid and solid dosage forms, such as liquid solutions (e.g., injectable and infusible solutions), dispersions or suspensions, liposomes, and suppositories. A suitable form depends on the intended mode of administration and therapeutic application. Typical suitable compositions are in the form of injectable or infusible solutions. One suitable mode of administration is parenteral (e.g., intravenous, subcutaneous, intraperitoneal, intramuscular). In an embodiment, the IL-2 agent is administered by intravenous infusion or injection. In another embodiment, the IL-2 agent is administered by intramuscular or subcutaneous injection. In an embodiment, the IL-2 agent is administered subcutaneously (e.g., presented in an autoinjector or prefilled syringe).

[0640] The terms “parenteral administration” and “administered parenterally” as used herein means modes of administration other than enteral and topical administration, usually by injection, and includes, without limitation, intravenous, intramuscular, intraarterial, intrathecal, intracapsular, intraorbital, intracardiac, intradermal, intraperitoneal, transtracheal, subcutaneous, subcuticular, intraarticular, subcapsular, subarachnoid, intraspinal, epidural and intrasternal injection and infusion.

[0641] Pharmaceutical compositions (e.g., for therapeutic applications) typically should be sterile and stable under the conditions of manufacture and storage. The composition can be formulated as a solution, microemulsion, dispersion, liposome, or other ordered structure suitable to high antibody concentration. Sterile injectable solutions can be prepared by incorporating the active compound (i.e., antibody or antibody portion) in the required amount in an appropriate solvent with one or a combination of ingredients enumerated above, as required, followed by filtered sterilization. Generally, dispersions are prepared by incorporating the active compound into a sterile vehicle that contains a basic dispersion medium and the required other ingredients from those enumerated above. In the case of sterile powders for the preparation of sterile injectable solutions, the preferred methods of preparation are vacuum drying and freeze-drying that yields a powder of the active ingredient plus any additional desired ingredient from a previously sterile-filtered solution thereof. The proper fluidity of a solution can be maintained, for example, by the use of a coating such as lecithin, by the maintenance of the required particle size in the case of dispersion and by the use of surfactants. Prolonged absorption of injectable compositions can be brought about by including in the composition an agent that delays absorption, for example, monostearate salts and gelatin.

[0642] The IL-2 agents described herein can be administered by a variety of methods. Several are known in the art, and for many therapeutic, prophylactic, or diagnostic applications, an appropriate route/mode of administration is intravenous injection or infusion. For example, the IL-2 agents can be administered by intravenous infusion at a rate of less than 10 mg/min; preferably less than or equal to 5 mg/min to reach a dose of about 1 to 100 mg/m², preferably about 5 to 50 mg/m², about 7 to 25 mg/m² and more preferably, about 10 mg/m². As will be appreciated by the skilled artisan, the route and/or mode of administration will vary depending upon the desired results. In certain embodiments, the active compound may be prepared with a carrier that will protect the compound against rapid release, such as a controlled release formulation, including implants, transdermal patches, and microencapsulated delivery systems. Biodegradable, biocompatible polymers can be used, such as ethylene vinyl acetate, polyanhydrides, polyglycolic acid, collagen, polyorthoesters, and polylactic acid. Many methods for the preparation of such formulations are patented or generally known to those skilled in the art. See, e.g., Sustained and Controlled Release Drug Delivery Systems, J. R. Robinson, ed., Marcel Dekker, Inc., New York, 1978.

[0643] In an embodiment, the IL-2 agent is orally administered, for example, with an inert diluent or an assimilable edible carrier. The IL-2 agent (and other ingredients, if desired) may also be enclosed in a hard or soft shell gelatin capsule, compressed into tablets, or incorporated directly into the subject's diet. For oral therapeutic administration, the IL-2 agent may be incorporated with excipients and used in the form of ingestible tablets, buccal tablets, troches, capsules, elixirs, suspensions, syrups, wafers, and the like. To administer an IL-2 agent by other than parenteral administration, it may be necessary to coat the compound with, or co-administer the compound with, a material to prevent its inactivation. Therapeutic, prophylactic, or diagnostic compositions can also be administered with medical devices, and several are known in the art.

[0644] Dosage regimens are adjusted to provide the desired response (e.g., a therapeutic, prophylactic, or diagnostic response). For example, a single bolus may be administered, several divided doses may be administered over time or the dose may be proportionally reduced or increased as indicated by the exigencies of the therapeutic situation. It is especially advantageous to formulate parenteral compositions in dosage unit form for ease of administration and uniformity of dosage. Dosage unit form as used herein refers to physically discrete units suited as unitary dosages for the subjects to be treated; each unit contains a predetermined quantity of active compound calculated to produce the desired therapeutic effect in association with the required pharmaceutical carrier. The specification for the dosage unit forms are dictated by and directly dependent on (a) the unique characteristics of the antibody molecule and the particular therapeutic, prophylactic, or diagnostic effect to be achieved, and (b) the limitations inherent in the art of compounding such an antibody molecule for the treatment of sensitivity in individuals.

[0645] An exemplary, non-limiting range for a therapeutically, prophylactically, or diagnostically effective amount of an IL-2 agent is about 0.1-50 mg/kg, e.g., about 0.1-30 mg/kg, e.g., about 1-30, 1-15, 1-10, 1-5, 5-10, or 1-3 mg/kg, e.g., about 1, 2, 3, 4, 5, 6, 7, 8, 9, 10, 15, 20, 30, 40, or 50 mg/kg. The IL-2 agent can be administered by intravenous infusion at a rate of less than 10 mg/min, e.g., less than or equal to 5 mg/min to reach a dose of about 1 to 100 mg/m², e.g., about 5 to 50 mg/m², about 7 to 25 mg/m², e.g., about 10 mg/m². It is to be noted that dosage values may vary with the type and severity of the condition to be alleviated. It is to be further understood that for any particular subject, specific dosage regimens should be adjusted over time according to the individual need and the professional judgment of the person administering or supervising the administration of the compositions, and that dosage ranges set forth herein are exemplary only and are not intended to limit the scope or practice of the claimed compositions.

[0646] The pharmaceutical compositions herein may include a “therapeutically effective amount,” “prophylactically effective amount,” or “diagnostically effectively amount” of an IL-2 agent described herein.

[0647] A “therapeutically effective amount” refers to an amount effective, at dosages and for periods of time necessary, to achieve the desired therapeutic result. A therapeutically effective amount of the polypeptide (e.g., antibody molecule or fusion protein) may vary according to factors such as the disease state, age, sex, and weight of the individual, and the ability of the antibody or antibody portion to elicit a desired response in the individual. A therapeutically effective amount is also one in which any toxic or detrimental effect of the antibody molecule is outweighed by the therapeutically beneficial effects. A “therapeutically effective dosage” typically inhibits a measurable parameter by at least about 20%, e.g., by at least about 40%, by at least about 60%, or by at least about 80% relative to untreated subjects. The measurable parameter may vary, e.g., based on the disordered being treated. The ability of an IL-2 agent to inhibit a measurable parameter can be evaluated in an animal model system predictive of efficacy in treating or preventing a disorder described herein. Alternatively, this property of a composition can be evaluated by examining the ability of the IL-2 agent to modulate a biological function of a target molecule or cell, e.g., by an in vitro assay.

[0648] A “prophylactically effective amount” refers to an amount effective, at dosages and for periods of time necessary, to achieve the desired prophylactic result. Typically, since a prophylactic dose is used in subjects prior to or at an earlier stage of disease, the prophylactically effective amount will be less than the therapeutically effective amount.

[0649] A “diagnostically effective amount” refers to an amount effective, at dosages and for periods of time necessary, to achieve the desired diagnostic result. Typically, a diagnostically effective amount is one in which a disorder, e.g., a disorder described herein, can be diagnosed in vitro, ex vivo, or in vivo.

[0650] In an embodiment, the pharmaceutical composition is a good manufacturing practices (GMP)-grade pharmaceutical composition. In an embodiment, a GMP-grade composition can be used as a pharmaceutical product. A “GMP-grade composition,” as that term is used herein, refers to a composition in compliance with current good manufacturing practice (cGMP) guidelines, or other similar requirements. In an embodiment, the pharmaceutical composition has greater than 99% purity, e.g., greater than 99.5%, 99.8%, or 99.9% purity. In an embodiment, greater than 50%, 60%, 70%, 80%, 90%, 95%, 98%, or 99% of the contaminants in the pharmaceutical composition are removed. In an embodiment, the pharmaceutical composition is in large scale, e.g., at least 20 g, 30 g, 40 g, 50 g, 100 g, 200 g, 300 g, 400 g, 500 g, 600 g, 700 g, 800 g, 900 g, 1000 g, or more.

[0651] The disclosure also provides kits that comprise IL-2 agents described herein. The kits can include one or more other elements including: instructions for use; other reagents, e.g., a label, a therapeutic agent, or an agent useful for chelating, or otherwise coupling, an antibody molecule coupled to a label or therapeutic agent, or a radioprotective composition; devices or other materials for preparing the IL-2 agent for administration; pharmaceutically acceptable carriers; and devices or other materials for administration to a subject.

### Nucleic Acids

[0652] The present disclosure also provides nucleic acids comprising a nucleotide sequence that encodes an IL-2 agent described herein.

[0653] In an embodiment, the nucleic acid comprises a nucleotide sequence encoding an amino acid sequence of an IL-2 variant described herein, or a nucleotide sequence substantially identical thereto (e.g., a sequence at least about 85%, 90%, 95%, 99% or more identical thereto, and/or capable of hybridizing under the stringency conditions described herein). In an embodiment, the nucleic acid comprises a nucleotide sequence encoding an IL-2 variant comprising one or more of the mutations described herein.

[0654] In an embodiment, the nucleic acid further comprises a nucleotide sequence encoding an Fc region, e.g., an Fc region described herein, or having a nucleotide sequence substantially identical thereto (e.g., a sequence at least about 85%, 90%, 95%, 99% or more identical thereto, and/or capable of hybridizing under the stringency conditions described herein). In an embodiment, the Fc region comprises one or more mutations, e.g., one or more mutations described herein. In an embodiment, the nucleic acid comprises from 5′ to 3′ a nucleotide sequence encoding an IL-2 variant described herein and a nucleotide sequence encoding an Fc region described herein.

[0655] In another embodiment, the nucleic acid further comprises a nucleotide sequence encoding a linker, e.g., a linker described herein, or a nucleotide sequence substantially homologous thereto (e.g., a sequence at least about 85%, 90%, 95%, 99% or more identical thereto, and/or capable of hybridizing under the stringency conditions described herein). In an embodiment, the nucleic acid comprises from 5′ to 3′ a nucleotide sequence encoding an IL-2 variant described herein and a nucleotide sequence encoding a linker described herein. In an embodiment, the nucleic acid comprises from 5′ to 3′ a nucleotide sequence encoding a linker described herein, and a nucleotide sequence encoding an Fc region described herein.

[0656] In another embodiment, the nucleic acid comprises a nucleotide sequence encoding an IL-2 fusion protein, e.g., an IL-2 fusion protein described herein, or a nucleotide sequence substantially homologous thereto (e.g., a sequence at least about 85%, 90%, 95%, 99% or more identical thereto, and/or capable of hybridizing under the stringency conditions described herein). In an embodiment, the nucleic acid encoding the IL-2 fusion protein comprises from 5′ to 3′ a nucleotide sequence encoding an IL-2 variant described herein and a nucleotide sequence encoding an Fc region described herein. In an embodiment, the nucleic acid encoding the IL-2 fusion protein comprises from 5′ to 3′ a nucleotide sequence encoding an IL-2 variant described herein, a nucleotide sequence encoding a linker described herein, and a nucleotide sequence encoding an Fc region described herein.

[0657] In an embodiment, the nucleic acid comprises a portion of a nucleotide sequence described herein. The portion may encode, for example, one, two, or all of an IL-2 variant, a linker, or an Fc region.

[0658] In an embodiment, the nucleic acid comprises a nucleotide sequence encoding an amino acid sequence described in Table 9, or a functional fragment thereof. In an embodiment, the nucleic acid comprises a nucleotide sequence described in Table 10.

[0659] In an embodiment, the nucleic acid comprises a nucleotide sequence encoding the amino acid sequence of any of SEQ ID NOs: 2-38 or 1000-1002, or a functional fragment thereof. In an embodiment, the nucleic acid comprises a nucleotide sequence encoding the amino acid sequence of any of SEQ ID NOs: 56-359 or 1004-1009, or a functional fragment thereof.

[0660] In an embodiment, the nucleic acid comprises a nucleotide sequence of any of SEQ ID NOs: 361-398 or 1010-1012, or a nucleotide sequence with at least 80%, 85%, 90%, 91%, 92%, 93%, 94%, 95%, 96%, 97%, 98%, 99%, or more sequence identity thereof, or differing by no more than 1, 2, 3, 4, 5, 6, 7, 8, 9, 10, 11, 12, 13, 14, 15, 20, 25, 30, 35, 40, 45, or 50 nucleotides thereto. In an embodiment, the nucleic acid further comprises a nucleotide sequence of any of SEQ ID NOs: 399-407 or 1013, or a nucleotide sequence with at least 80%, 85%, 90%, 91%, 92%, 93%, 94%, 95%, 96%, 97%, 98%, 99%, or more sequence identity thereof, or differing by no more than 1, 2, 3, 4, 5, 6, 7, 8, 9, 10, 11, 12, 13, 14, 15, 20, 25, or 30 nucleotides thereto. In an embodiment, the nucleic acid further comprises a nucleotide sequence of any of SEQ ID NOs: 408-415.

[0661] In an embodiment, the nucleic acid comprises a nucleotide sequence of any of SEQ ID NOs: 416-481 or 1014-1019, or a nucleotide sequence with at least 80%, 85%, 90%, 91%, 92%, 93%, 94%, 95%, 96%, 97%, 98%, 99%, or more sequence identity thereof, or differing by no more than 1, 2, 3, 4, 5, 6, 7, 8, 9, 10, 11, 12, 13, 14, 15, 20, 25, 30, 35, 40, 45, 50, 55, 60, 65, 70, 75, 80, 85, 90, 95, or 100 nucleotides thereto. In an embodiment, the nucleic acid comprises a nucleotide sequence of any of SEQ ID NOs: 416-453 or 1014-1019. In an embodiment, the nucleic acid comprises a nucleotide sequence of any of SEQ ID NOs: 454-491. In an embodiment, the nucleic acid comprises a nucleotide sequence of any of SEQ ID NOs: 492-529. In an embodiment, the nucleic acid comprises a nucleotide sequence of any of SEQ ID NOs: 416-453. In an embodiment, the nucleic acid comprises a nucleotide sequence of any of SEQ ID NOs: 454-491. In an embodiment, the nucleic acid comprises a nucleotide sequence of any of SEQ ID NOs: 492-529. In an embodiment, the nucleic acid comprises a nucleotide sequence of any of SEQ ID NOs: 530-567. In an embodiment, the nucleic acid comprises a nucleotide sequence of any of SEQ ID NOs: 568-605. In an embodiment, the nucleic acid comprises a nucleotide sequence of any of SEQ ID NOs: 606-643. In an embodiment, the nucleic acid comprises a nucleotide sequence of any of SEQ ID NOs: 644-681.

[0662] In an embodiment, the nucleic acid comprises the nucleotide sequence of any of SEQ ID NOs: 364, 365, 371, or 1010-1012, or a nucleotide sequence with at least 80%, 85%, 90%, 91%, 92%, 93%, 94%, 95%, 96%, 97%, 98%, 99%, or more sequence identity thereof, or differing by no more than 1, 2, 3, 4, 5, 6, 7, 8, 9, 10, 11, 12, 13, 14, 15, 20, 25, 30, 35, 40, 45, or 50 nucleotides thereto. In an embodiment, the nucleic acid comprises the nucleotide sequence of SEQ ID NO: 364. In an embodiment, the nucleic acid comprises the nucleotide sequence of SEQ ID NO: 365. In an embodiment, the nucleic acid comprises the nucleotide sequence of SEQ ID NO: 371. In an embodiment, the nucleic acid comprises the nucleotide sequence of SEQ ID NO: 1010. In an embodiment, the nucleic acid comprises the nucleotide sequence of SEQ ID NO: 1011. In an embodiment, the nucleic acid comprises the nucleotide sequence of SEQ ID NO: 1012.

[0663] In an embodiment, the nucleic acid further comprises the nucleotide sequence of SEQ ID NO: 1013, or a nucleotide sequence with at least 80%, 85%, 90%, 91%, 92%, 93%, 94%, 95%, 96%, 97%, 98%, 99%, or more sequence identity thereof, or differing by no more than 1, 2, 3, 4, 5, 6, 7, 8, 9, 10, 11, 12, 13, 14, 15, 20, 25, or 30 nucleotides thereto. In an embodiment, the nucleic acid further comprises the nucleotide sequence of SEQ ID NO: 48.

[0664] In an embodiment, the nucleic acid comprises the nucleotide sequence of any of SEQ ID NOs: 1014-1017, or a nucleotide sequence with at least 80%, 85%, 90%, 91%, 92%, 93%, 94%, 95%, 96%, 97%, 98%, 99%, or more sequence identity thereof, or differing by no more than 1, 2, 3, 4, 5, 6, 7, 8, 9, 10, 11, 12, 13, 14, 15, 20, 25, 30, 35, 40, 45, or 50 nucleotides thereto. In an embodiment, the nucleic acid comprises the nucleotide sequence of SEQ ID NO: 1014. In an embodiment, the nucleic acid comprises the nucleotide sequence of SEQ ID NO: 1015. In an embodiment, the nucleic acid comprises the nucleotide sequence of SEQ ID NO: 1016. In an embodiment, the nucleic acid comprises the nucleotide sequence of SEQ ID NO: 1017. In an embodiment, the nucleic acid comprises the nucleotide sequence of SEQ ID NO: 1018. In an embodiment, the nucleic acid comprises the nucleotide sequence of SEQ ID NO: 1019.

[0665] In an embodiment, the nucleic acid comprises the nucleotide sequence of SEQ ID NO: 364. In an embodiment, the nucleic acid comprises the nucleotide sequence of SEQ ID NO: 365. In an embodiment, the nucleic acid comprises the nucleotide sequence of SEQ ID NO: 371. In an embodiment, the nucleic acid comprises the nucleotide sequence of SEQ ID NO: 1010. In an embodiment, the nucleic acid comprises the nucleotide sequence of SEQ ID NO: 1011. In an embodiment, the nucleic acid comprises the nucleotide sequence of SEQ ID NO: 1012. In an embodiment, the nucleic acid further comprises the nucleotide sequence of SEQ ID NO: 1013. In an embodiment, the nucleic acid further comprises the nucleotide sequence of SEQ ID NO: 48. In an embodiment, the nucleic acid comprises the nucleotide sequence of SEQ ID NO: 1014. In an embodiment, the nucleic acid comprises the nucleotide sequence of SEQ ID NO: 1015. In an embodiment, the nucleic acid comprises the nucleotide sequence of SEQ ID NO: 1016. In an embodiment, the nucleic acid comprises the nucleotide sequence of SEQ ID NO: 1017. In an embodiment, the nucleic acid comprises the nucleotide sequence of SEQ ID NO: 1018. In an embodiment, the nucleic acid comprises the nucleotide sequence of SEQ ID NO: 1019.

[0666] The nucleic acids disclosed herein include deoxyribonucleotides or ribonucleotides, or analogs thereof. The polynucleotide may be either single-stranded or double-stranded, and if single-stranded may be the coding strand or non-coding (antisense) strand. A polynucleotide may comprise modified nucleotides, such as methylated nucleotides and nucleotide analogs. The sequence of nucleotides may be interrupted by non-nucleotide components. A polynucleotide may be further modified after polymerization, such as by conjugation with a labeling component. The nucleic acid may be a recombinant polynucleotide, or a polynucleotide of genomic, cDNA, semisynthetic, or synthetic origin which either does not occur in nature or is linked to another polynucleotide in a non-natural arrangement.

[0667] In an aspect, the disclosure features host cells and vectors comprising the nucleic acids described herein. The nucleic acids may be present in a single vector or separate vectors present in the same host cell or separate host cell, as described in more detail below.

[0668] In an aspect, the disclosure features methods of treating a disorder (e.g., a disorder described herein) comprising administering to a subject in need thereof an effective amount of a nucleic acid described herein.

### Vectors

[0669] The present disclosure features vectors that comprises a nucleotide sequence encoding an IL-2 agent described herein. In an embodiment, the vector comprises a nucleic acid described herein (e.g., in Table 10).

[0670] In an embodiment, the vector comprises a nucleotide sequence encoding an amino acid sequence of an IL-2 variant described herein (e.g., in Table 9), or a nucleotide sequence substantially identical thereto (e.g., a sequence at least about 85%, 90%, 95%, 99% or more identical thereto, and/or capable of hybridizing under the stringency conditions described herein). In an embodiment, the vector comprises a nucleotide sequence encoding an IL-2 variant comprising one or more of the mutations described herein.

[0671] In an embodiment, the vector further comprises a nucleotide sequence encoding an Fc region, e.g., an Fc region described herein, or having a nucleotide sequence substantially identical thereto (e.g., a sequence at least about 85%, 90%, 95%, 99% or more identical thereto, and/or capable of hybridizing under the stringency conditions described herein). In an embodiment, the Fc region comprises one or more mutations, e.g., one or more mutations described herein. In an embodiment, the vector comprises from 5′ to 3′ a nucleotide sequence encoding an IL-2 variant described herein and a nucleotide sequence encoding an Fc region described herein.

[0672] In another embodiment, the vector further comprises a nucleotide sequence encoding a linker, e.g., a linker described herein, or a nucleotide sequence substantially homologous thereto (e.g., a sequence at least about 85%, 90%, 95%, 99% or more identical thereto, and/or capable of hybridizing under the stringency conditions described herein). In an embodiment, the vector comprises from 5′ to 3′ a nucleotide sequence encoding an IL-2 variant described herein and a nucleotide sequence encoding a linker described herein. In an embodiment, the vector comprises from 5′ to 3′ a nucleotide sequence encoding a linker described herein, and a nucleotide sequence encoding an Fc region described herein.

[0673] In another embodiment, the vector comprises a nucleotide sequence encoding an IL-2 fusion protein, e.g., an IL-2 fusion protein described herein, or a nucleotide sequence substantially homologous thereto (e.g., a sequence at least about 85%, 90%, 95%, 99% or more identical thereto, and/or capable of hybridizing under the stringency conditions described herein). In an embodiment, the vector encoding the IL-2 fusion protein comprises from 5′ to 3′ a nucleotide sequence encoding an IL-2 variant described herein and a nucleotide sequence encoding an Fc region described herein. In an embodiment, the vector encoding the IL-2 fusion protein comprises from 5′ to 3′ a nucleotide sequence encoding an IL-2 variant described herein, a nucleotide sequence encoding a linker described herein, and a nucleotide sequence encoding an Fc region described herein.

[0674] In an embodiment, the vector further comprises a nucleotide sequence encoding a heavy chain variable region of an anti-IL-2 antibody molecule, e.g., an anti-IL-2 antibody molecule described herein. In an embodiment, the vector further comprises a nucleotide sequence encoding a light chain variable region of an anti-IL-2 antibody molecule, e.g., an anti-IL-2 antibody molecule described herein. In yet another embodiment, the vector further comprises a nucleotide sequence encoding a heavy chain variable region and a light chain variable region of an anti-IL-2 antibody molecule, e.g., an anti-IL-2 antibody molecule described herein.

[0675] In an embodiment, the vector further comprises a nucleotide sequence encoding at least one, two, or three CDRs from a heavy chain variable region of an anti-IL-2 antibody molecule, e.g., an anti-IL-2 antibody molecule described herein. In another embodiment, the vector further comprises a nucleotide sequence encoding at least one, two, or three CDRs from a light chain variable region of an anti-IL-2 antibody molecule, e.g., an anti-IL-2 antibody molecule described herein. In yet another embodiment, the vector comprises a nucleotide sequence encoding at least one, two, three, four, five, or six CDRs from heavy and light chain variable regions of an anti-IL-2 antibody molecule, e.g., an anti-IL-2 antibody molecule described herein.

[0676] In an embodiment, the vector comprises a portion of a nucleotide sequence described herein. The portion may encode, for example, an IL-2 variant; a liker an Fc region; a variable region (e.g., VH or VL); one, two, or three or more (e.g., four, five, or six) CDRs; or one, two, three, or four or more framework regions.

[0677] The vectors include, but are not limited to, a virus, plasmid, cosmid, lambda phage or a yeast artificial chromosome (YAC).

[0678] Numerous vector systems can be employed. For example, one class of vectors utilizes DNA elements which are derived from animal viruses such as, for example, bovine papilloma virus, polyoma virus, adenovirus, vaccinia virus, baculovirus, retroviruses (Rous Sarcoma Virus, MMTV or MOMLV) or SV40 virus. Another class of vectors utilizes RNA elements derived from RNA viruses such as Semliki Forest virus, Eastern Equine Encephalitis virus and Flaviviruses.

[0679] Additionally, cells which have stably integrated the DNA into their chromosomes may be selected by introducing one or more markers which allow for the selection of transfected host cells. The marker may provide, for example, prototropy to an auxotrophic host, biocide resistance (e.g., antibiotics), or resistance to heavy metals such as copper, or the like. The selectable marker gene can be either directly linked to the DNA sequences to be expressed or introduced into the same cell by cotransformation. Additional elements may also be needed for optimal synthesis of mRNA. These elements may include splice signals, as well as transcriptional promoters, enhancers, and termination signals.

[0680] Once the expression vector or DNA sequence containing the constructs has been prepared for expression, the expression vectors may be transfected or introduced into an appropriate host cell. Various techniques may be employed to achieve this, such as, for example, protoplast fusion, calcium phosphate precipitation, electroporation, retroviral transduction, viral transfection, gene gun, lipid based transfection or other conventional techniques. In the case of protoplast fusion, the cells are grown in media and screened for the appropriate activity.

[0681] Methods and conditions for culturing the resulting transfected cells and for recovering the polypeptides (e.g., IL-2 variants or IL-2 fusion proteins) produced are known to those skilled in the art and may be varied or optimized depending upon the specific expression vector and mammalian host cell employed, based upon the present description.

### Cells

[0682] The present disclosure also provides cells comprising a nucleic acid or vector encoding an IL-2 agent described herein.

[0683] In an embodiment, the cell is a host cell. For example, the host cell can comprise an IL-2 agent engineered in accordance with a method described herein. In an embodiment, the cell is an isolated cell. In an embodiment, the cell is a cultured cell.

[0684] In an embodiment, the cell comprises a nucleic acid comprising a nucleotide sequence encoding an IL-2 agent described herein (e.g., in Table 10), a nucleotide sequence substantially homologous thereto (e.g., a sequence at least about 85%, 90%, 95%, 99% or more identical thereto, and/or capable of hybridizing under the stringency conditions described herein), or a portion of the aforesaid nucleic acid. In an embodiment, the cell comprises a vector comprising a nucleotide sequence encoding an IL-2 agent described herein, a nucleotide sequence substantially homologous thereto (e.g., a sequence at least about 85%, 90%, 95%, 99% or more identical thereto, and/or capable of hybridizing under the stringency conditions described herein), or a portion of the aforesaid vector.

[0685] In an embodiment, the cell is genetically engineered to comprise a nucleic acid or vector encoding an IL-2 agent described herein. In an embodiment, the host cells are genetically engineered by using an expression cassette. The phrase “expression cassette,” refers to nucleotide sequences, which are capable of affecting expression of a gene in hosts compatible with such sequences. Such cassettes may include a promoter, an open reading frame with or without introns, and a termination signal. Additional factors necessary or helpful in effecting expression may also be used, for example, an inducible promoter.

[0686] The cell can be, but is not limited to, a eukaryotic cell, a bacterial cell, an insect cell, or a human cell. Suitable eukaryotic cells include, but are not limited to, Vero cells, HeLa cells, COS cells, CHO cells, HEK293 cells, BHK cells and MDCKII cells. Suitable insect cells include, but are not limited to, Sf9 cells.

Uses of IL-2 agents

[0687] The IL-2 agents (e.g., IL-2 variants, fusion polypeptides, complexes, or immunoconjugates) described herein, as well as the compositions described herein and the nucleic acids described herein, have in vitro, ex vivo, and in vivo therapeutic, prophylactic, and/or diagnostic utilities.

[0688] In an embodiment, the IL-2 agent modulates (e.g., reduces (e.g., inhibits, blocks, or neutralizes) or increases (e.g., activates, initiates, or enhances)) one or more biological activities associated with IL-2. For example, these IL-2 agents can be administered to cells in culture, in vitro or ex vivo, or to a subject, e.g., a human subject, e.g., in vivo, to modulate one or more biological activities associated with IL-2. Accordingly, in an aspect, the disclosure provides a method of treating, preventing, or diagnosing a disorder, e.g., a disorder described herein, in a subject, comprising administering to the subject an IL-2 agent described herein, such that the disorder is treated, prevented, or diagnosed. For example, the disclosure provides a method comprising contacting the IL-2 agent described herein with cells in culture, e.g. in vitro or ex vivo, or administering the IL-2 agent described herein to a subject, e.g., in vivo, to treat, prevent, or diagnose a disorder, e.g., a disorder associated with IL-2 (e.g., a disorder described herein).

[0689] As used herein, the term “subject” is intended to include human and non-human animals. In an embodiment, the subject is a human subject, e.g., a human patient having a disorder described herein, or at risk of having a disorder described herein. The term “non-human animals” includes mammals and non-mammals, such as non-human primates. In an embodiment, the subject is a human. The methods and compositions described herein are suitable for treating human patients for a disorder described herein. Patients having a disorder described herein include those who have developed a disorder described herein but are (at least temporarily) asymptomatic, patients who have exhibited a symptom of a disorder described herein, or patients having a disorder related to or associated with a disorder described herein.

[0690] Without wishing to be bound by theory, it is believed that in an embodiment, the IL-2 agents described herein selectively stimulate regulatory T cells (Tregs). For example, the IL-2 agents described herein can promotes the proliferation, survival, activation, and/or function of CD3+FoxP3+ T cells over CD3+FoxP3− T cells. Methods of measuring the ability to selectively stimulate Tregs can be measured by flow cytometry of peripheral blood leukocytes, in which there is an observed increase in the percentage of FOXP3+CD4+ T cells among total CD4+ T cells, an increase in percentage of FOXP3+CD8+ T cells among total CD8+ T cells, an increase in percentage of FOXP3+ T cells relative to NK cells, and/or a greater increase in the expression level of CD25 on the surface of FOXP3+ T cells relative to the increase of CD25 expression on other T cells. Preferential growth of Treg cells can also be detected as increased representation of demethylated FOXP3 promoter DNA (i.e. the Treg-specific demethylated region, or TSDR) relative to demethylated CD3 genes in DNA extracted from whole blood, as detected by sequencing of polymerase chain reaction (PCR) products from bisulfite-treated genomic DNA (J. Sehouli, et al. 2011. Epigenetics 6:2, 236-246). Without wishing to be bound by theory, it is believed that in an embodiment, the IL-2 agents described agents can achieve immune modulation through selective activation of regulatory T cells, resulting in T reg stimulation with minimal effect on T effector and NK cells. The IL-2 agents described herein are particularly suitable for treating autoimmune and inflammatory diseases, e.g., primarily mediated by Effector T cell activation (e.g., systemic lupus erythematous, lupus nephritis, autoimmune hepatitis, psoriasis, nephrotic syndrome, immune-mediated focal segmented glomerulosclerosis, and alopecia areata). In an embodiment, the IL-2 agent results in immune modulation without immunosuppression, which is highly desired in an IL-2 therapy.

[0691] In an aspect, the disclosure provides a method of increasing the ratio of regulatory T cells (Tregs) to non-regulatory T cells (non-Tregs) within a population of T cells, comprising contacting the population of T cells with an effective amount of an IL-2 agent described herein.

[0692] In an embodiment, the IL-2 agent selectively increases the ratio of Tregs over non-Tregs by about 20%, 30%, 40%, 50%, 60%, 70%, 80%, 90%, 100%, or more, or about 2, 3, 4, 5, 6, 7, 8, 9, 10-fold or more. In an embodiment, the IL-2 agent selectively increases the ratio of CD3+FoxP3+ cells to CD3+FoxP3− cells by about 20%, 30%, 40%, 50%, 60%, 70%, 80%, 90%, 100%, or more, or about 2, 3, 4, 5, 6, 7, 8, 9, 10-fold or more.

[0693] In an aspect, the disclosure provides a method of increasing the ratio of regulatory T cells (Tregs) to non-regulatory T cells (non-Tregs) in a subject (e.g., in the peripheral blood of a subject), comprising contacting the subject or sample with an effective amount of an IL-2 agent described herein.

[0694] In an embodiment, the IL-2 agent selectively increases the ratio of Tregs over non-Tregs in the subject, or in a sample (e.g., a peripheral blood sample) from the subject, by about 20%, 30%, 40%, 50%, 60%, 70%, 80%, 90%, 100%, or more, or about 2, 3, 4, 5, 6, 7, 8, 9, 10-fold or more. In an embodiment, the IL-2 agent selectively increases the ratio of CD3+FoxP3+ cells to CD3+FoxP3− cells in the subject, or in a sample (e.g., a peripheral blood sample) from the subject, by about 20%, 30%, 40%, 50%, 60%, 70%, 80%, 90%, 100%, or more, or about 2, 3, 4, 5, 6, 7, 8, 9, 10-fold or more.

[0695] In an aspect, the disclosure provides a method of increasing the ratio of regulatory T cells (Tregs) to natural killer cells (NKs) in a subject (e.g., in the peripheral blood of a subject), comprising contacting the subject or sample with an effective amount of an IL-2 agent described herein.

[0696] In an embodiment, the IL-2 agent selectively increases the ratio of Tregs over NKs in the subject, or in a sample (e.g., a peripheral blood sample) from the subject, by about 20%, 30%, 40%, 50%, 60%, 70%, 80%, 90%, 100%, or more, or about 2, 3, 4, 5, 6, 7, 8, 9, 10-fold or more. In an embodiment, the IL-2 agent selectively increases the ratio of CD3+FoxP3+ cells to CD3-CD19-lymphocytes expressing CD56 and/or CD16 in the subject, or in a sample (e.g., a peripheral blood sample) from the subject, by about 20%, 30%, 40%, 50%, 60%, 70%, 80%, 90%, 100%, or more, or about 2, 3, 4, 5, 6, 7, 8, 9, 10-fold or more.

### Methods of Treating or Preventing Disorders

[0697] The IL-2 agents (e.g., IL-2 variants, fusion polypeptides, complexes, or immunoconjugates) described herein, as well as the pharmaceutical compositions disclosed herein and the nucleic acids described herein, can be used to treat or prevent various disorders or conditions.

[0698] In an embodiment, the disorder is an immune disorder, e.g., an autoimmune disease. In an embodiment, the disorder is a cancer. In an embodiment, the disorder is an infectious disease.

[0699] The IL-2 agents described herein can have an optimal or improved half-life, which can be desirable for treating or preventing a wide range of disorders or conditions. While not wishing to be bound by theory, it is believed that in an embodiment, the IL-2 agents described herein can provide one or more benefits over another IL-2 agent having the same or similar binding affinity and/or specificity (e.g., an IL-2 agent that does not have, or has not been engineered to have, an optimal or improved half-life). These benefits can include, but are not limited to, an increased therapeutic or preventive efficacy, a reduced dosage regimen, or an improved pharmacokinetic property. In an embodiment, the IL-2 includes a mutated Fc region as described herein.

[0700] In an embodiment, the ratio of regulatory T cells (Tregs) to non-regulatory T cells within the subject (e.g., in the peripheral blood of the subject) increases after the administration. In an embodiment, the ratio of regulatory T cells (Tregs) to non-regulatory T cells within the subject (e.g., in the peripheral blood of the subject) remains essentially the same after the administration. In an embodiment, the method further comprises identifying a subject who needs an increased level of Tregs. In an embodiment, the method further comprises determining the level of Tregs in the subject prior to and/or after the administration.

[0701] Exemplary immune disorders or conditions that can be treated or prevented by the IL-2 agents described herein include, but are not limited to, Addison's disease, agammaglobulinemia, alopecia areata, amyloidosis, ankylosing spondylitis, anti-GBM/anti-TBM nephritis, antiphospholipid syndrome (APS), autoimmune hepatitis, autoimmune inner ear disease (AIED), axonal & neuronal neuropathy (AMAN), Behcet's disease, Bullous pemphigoid, Castleman disease (CD), Celiac disease, Chagas disease, chronic inflammatory demyelinating polyneuropathy (CIDP), chronic recurrent multifocal osteomyelitis (CRMO), Churg-Strauss, Cicatricial pemphigoid/benign mucosal pemphigoid, Cogan's syndrome, Cold agglutinin disease, Congenital heart block, Coxsackie myocarditis, CREST syndrome, Crohn's disease, dermatitis herpetiformis, dermatomyositis, Devic's disease (neuromyelitis optica), Discoid lupus, Dressler's syndrome, endometriosis, eosinophilic esophagitis (EoE), eosinophilic fasciitis, erythema nodosum, essential mixed cryoglobulinemia, Evans syndrome, fibromyalgia, fibrosing alveolitis, focal segmented glomerulosclerosis (FSGS) (e.g., immune-mediated FSGS (IM-FSGS)), giant cell arteritis (temporal arteritis), giant cell myocarditis, Glomerulonephritis, Goodpasture's syndrome, Granulomatosis with Polyangiitis, Graft-versus-host disease (GvHD), Graves' disease, Guillain-Barre syndrome, Hashimoto's thyroiditis, hemolytic anemia, Henoch-Schonlein purpura (HSP), herpes gestationis or pemphigoid gestationis (PG), hypogammalglobulinemia, IgA nephropathy, IgG4-related sclerosing disease, inclusion body myositis (IBM), interstitial cystitis (IC), juvenile arthritis, juvenile diabetes (Type 1 diabetes), juvenile myositis (JM), Kawasaki disease, Lambert-Eaton syndrome, leukocytoclastic vasculitis, Lichen planus, Lichen sclerosus, Ligneous conjunctivitis, linear IgA disease (LAD), lupus (e.g., systemic lupus erythematosus (SLE) or lupus nephritis), Lyme disease chronic, Membranous neuropathy, Meniere's disease, microscopic polyangiitis (MPA), mixed connective tissue disease (MCTD), Mooren's ulcer, Mucha-Habermann disease, multiple sclerosis (MS), Myasthenia gravis, Myositis, Narcolepsy, nephrotic syndrome, Neuromyelitis optica, neutropenia, ocular cicatricial pemphigoid, optic neuritis, palindromic rheumatism (PR), PANDAS (Pediatric Autoimmune Neuropsychiatric Disorders Associated with Streptococcus), paraneoplastic cerebellar degeneration (PCD), Paroxysmal nocturnal hemoglobinuria (PNH), Parry Romberg syndrome, Pars planitis (peripheral uveitis), Parsonnage-Turner syndrome, Pemphigus, peripheral neuropathy, Perivenous encephalomyelitis, pernicious anemia (PA), POEMS syndrome (polyneuropathy, organomegaly, endocrinopathy, monoclonal gammopathy, skin changes), polyarteritis nodosa, polymyalgia rheumatica, polymyositis, postmyocardial infarction syndrome, postpericardiotomy syndrome, primary biliary cirrhosis, primary sclerosing cholangitis, progesterone dermatitis, psoriasis, psoriatic arthritis, pure red cell aplasia (PRCA), pyoderma gangrenosum, Raynaud's phenomenon, Reactive Arthritis, Reflex sympathetic dystrophy, Reiter's syndrome, relapsing polychondritis, restless legs syndrome (RLS), retroperitoneal fibrosis, rheumatic fever, rheumatoid arthritis (RA), sarcoidosis, Schmidt syndrome, scleritis, scleroderma, Sjogren's syndrome, sperm & testicular autoimmunity, Stiff person syndrome (SPS), subacute bacterial endocarditis (SBE), Susac's syndrome, sympathetic ophthalmia (SO), Takayasu's arteritis, temporal arteritis/Giant cell arteritis, thrombocytopenic purpura (TTP), Tolosa-Hunt syndrome (THS), transverse myelitis, type 1 diabetes, ulcerative colitis (UC), undifferentiated connective tissue disease (UCTD), uveitis, vasculitis, vitiligo, or Wegener's granulomatosis (Granulomatosis with Polyangiitis (GPA)).

[0702] In an embodiment, the disorder that can be treated or prevented by the IL-2 agents described herein is lupus nephritis. In an embodiment, the disorder that can be treated or prevented by the IL-2 agents described herein is autoimmune hepatitis. In an embodiment, the disorder that can be treated or prevented by the IL-2 agents described herein is nephrotic syndrome. In an embodiment, the disorder that can be treated or prevented by the IL-2 agents described herein is psoriasis. In an embodiment, the disorder that can be treated or prevented by the IL-2 agents described herein is systemic lupus erythematous (SLE). In an embodiment, the disorder that can be treated or prevented by the IL-2 agents described herein is focal segmented glomerulosclerosis (FSGS), e.g., immune-mediated FSGS (IM-FSGS). In an embodiment, the disorder that can be treated or prevented by the IL-2 agents described herein is alopecia areata (AA).

[0703] Exemplary disorders or conditions that can be treated or prevented by the IL-2 agents described herein include, but are not limited to, a cancer (e.g., a solid tumor or a hematologic cancer), an infectious disease (e.g., a bacterial infection or a viral infection), an immune disorder (e.g., an autoimmune disorder), or an organ transplant rejection (e.g., graft-versus-host disease (GvHD)). In an embodiment, the disorder is a chronic disorder.

[0704] Exemplary cancers that can be treated or prevented by the IL-2 agents described herein include, but are not limited to, acute lymphoblastic leukemia (ALL), acute myeloid leukemia (AML), adrenocortical carcinoma, Kaposi sarcoma, an AIDS-related lymphoma, primary central nervous system (CNS) lymphoma, anal cancer, appendix cancer, astrocytoma, atypical teratoid/rhabdoid tumor, basal cell carcinoma, bile duct cancer, bladder cancer, bone cancer (e.g., Ewing sarcoma or osteosarcoma and malignant fibrous histiocytoma), brain tumor (e.g., astrocytomas, brain stem glioma, central nervous system atypical teratoid/rhabdoid tumor, central nervous system embryonal tumor, central nervous system germ cell tumor, craniopharyngioma, or ependymoma), breast cancer, bronchial tumor, Burkitt lymphoma, carcinoid tumor (e.g., gastrointestinal carcinoid tumor), cardiac (heart) tumor, embryonal tumor, germ cell tumor, lymphoma, cervical cancer, cholangiocarcinoma, chordoma, chronic lymphocytic leukemia (CLL), chronic myelogenous leukemia (CML), chronic myeloproliferative neoplasm, colon cancer, colorectal cancer, craniopharyngioma, cutaneous T-cell lymphoma, ductal carcinoma in situ (DCIS), endometrial cancer, ependymoma, esophageal cancer, esthesioneuroblastoma, Ewing sarcoma, extracranial germ cell tumor, extragonadal germ cell tumor, eye cancer (e.g., intraocular melanoma or retinoblastoma), fallopian tube cancer, fibrous histiocytoma of bone, osteosarcoma, gallbladder cancer, gastric (stomach) cancer, gastrointestinal carcinoid tumor, gastrointestinal stromal tumors (GIST), germ cell tumor (e.g., central nervous system tumor, extracranial tumor, extragonadal tumor, ovarian cancer, or testicular cancer), gestational trophoblastic disease, glioma, hairy cell leukemia, head and neck cancer, hepatocellular (liver) cancer, Hodgkin lymphoma, hypopharyngeal cancer, intraocular melanoma, islet cell tumor, pancreatic neuroendocrine tumor, Kaposi sarcoma, kidney cancer (e.g., renal cell cancer or Wilms tumor), Langerhans cell histiocytosis (LCH), laryngeal cancer, leukemia (e.g., acute lymphoblastic leukemia (ALL), acute myeloid leukemia (AML), chronic lymphocytic leukemia (CLL), chronic myelogenous leukemia (CML), or hairy cell leukemia), lip and oral cavity cancer, liver cancer, lung cancer (e.g., non-small cell lung cancer (NSCLC) or small cell lung cancer), lymphoma (e.g., aids-related, Burkitt lymphoma, cutaneous T-cell lymphoma, Hodgkin lymphoma, non-Hodgkin lymphoma, or primary central nervous system (CNS) lymphoma), Waldenström macroglobulinemia, male breast cancer, malignant fibrous histiocytoma of bone and osteosarcoma, melanoma (e.g., intraocular (eye) melanoma), Merkel cell carcinoma, mesothelioma, metastatic squamous neck cancer, midline tract carcinoma, mouth cancer, multiple endocrine neoplasia syndrome, multiple myeloma/plasma cell neoplasm, mycosis fungoides, myelodysplastic syndrome, myelodysplastic/myeloproliferative neoplasm, chronic myeloproliferative neoplasm, nasal cavity and paranasal sinus cancer, nasopharyngeal cancer, neuroblastoma, oral cancer, lip and oral cavity cancer, oropharyngeal cancer, osteosarcoma and malignant fibrous histiocytoma of bone, ovarian cancer (e.g., epithelial ovarian cancer or germ cell ovarian tumor), pancreatic cancer, pancreatic neuroendocrine tumors (islet cell tumors), papillomatosis, paraganglioma, paranasal sinus and nasal cavity cancer, parathyroid cancer, penile cancer, pharyngeal cancer, pheochromocytoma, pituitary tumor, pleuropulmonary blastoma, peritoneal cancer, prostate cancer, rectal cancer, retinoblastoma, rhabdomyosarcoma, salivary gland cancer, sarcoma (e.g., Ewing sarcoma, Kaposi sarcoma, osteosarcoma, rhabdomyosarcoma, soft tissue sarcoma, or uterine sarcoma), Sézary syndrome, skin cancer (e.g., melanoma, Merkel cell carcinoma, or nonmelanoma skin cancer), small intestine cancer, squamous cell carcinoma, testicular cancer, throat cancer, thymoma and thymic carcinoma, thyroid cancer, transitional cell cancer of the renal pelvis and ureter, urethral cancer, endometrial uterine cancer, vaginal cancer, vulvar cancer, or a metastatic lesion thereof.

[0705] Exemplary infectious diseases that can be treated or prevented by the IL-2 agents described herein include, but are not limited to, Acinetobacter infections, actinomycosis, African sleeping sickness (African trypanosomiasis), AIDS (acquired immunodeficiency syndrome), amebiasis, anaplasmosis, angiostrongyliasis, anisakiasis, anthrax, arcanobacterium haemolyticum infection, argentine hemorrhagic fever, ascariasis, aspergillosis, astrovirus infection, babesiosis, Bacillus cereus infection, bacterial pneumonia, bacterial vaginosis, bacteroides infection, balantidiasis, bartonellosis, baylisascaris infection, bk virus infection, black piedra, blastocystosis, blastomycosis, bolivian hemorrhagic fever, botulism (and infant botulism), brazilian hemorrhagic fever, brucellosis, bubonic plague, burkholderia infection, buruli ulcer, calicivirus infection (norovirus and sapovirus), campylobacteriosis, candidiasis (moniliasis; thrush), capillariasis, carrion's disease, cat-scratch disease, cellulitis, chagas disease (american trypanosomiasis), chancroid, chickenpox, chikungunya, chlamydia, chlamydophila pneumoniae infection (taiwan acute respiratory agent or twar), cholera, chromoblastomycosis, chytridiomycosis, clonorchiasis, Clostridium difficile colitis, coccidioidomycosis, colorado tick fever (CTF), common cold (Acute viral rhinopharyngitis; Acute coryza), Creutzfeldt-Jakob disease (CJD), Crimean-Congo hemorrhagic fever (CCHF), cryptococcosis, cryptosporidiosis, cutaneous larva migrans (CLM), cyclosporiasis, cysticercosis, cytomegalovirus infection, dengue fever, desmodesmus infection, dientamoebiasis, diphtheria, diphyllobothriasis, dracunculiasis, ebola hemorrhagic fever, echinococcosis, ehrlichiosis, enterobiasis (pinworm infection), enterococcus infection, enterovirus infection, epidemic typhus, erythema infectiosum (fifth disease), exanthem subitum (sixth disease), fasciolasis, fasciolopsiasis, fatal familial insomnia (FFI), filariasis, food poisoning by Clostridium perfringens, free-living amebic infection, fusobacterium infection, gas gangrene (clostridial myonecrosis), geotrichosis, gerstmann-straussler-scheinker syndrome (GSS), giardiasis, glanders, gnathostomiasis, gonorrhea, granuloma inguinale (donovanosis), Group A streptococcal infection, Group B streptococcal infection, Haemophilus influenzae infection, hand, foot and mouth disease (HFMD), Hantavirus Pulmonary Syndrome (HPS), heartland virus disease, helicobacter pylori infection, hemolytic-uremic syndrome (HUS), hemorrhagic fever with renal syndrome (HFRS), hepatitis A, hepatitis B, hepatitis C, hepatitis D, hepatitis E, herpes simplex, histoplasmosis, hookworm infection, human bocavirus infection, human ewingii ehrlichiosis, human granulocytic anaplasmosis (HGA), human metapneumovirus infection, Human monocytic ehrlichiosis, human papillomavirus (HPV) infection, Human parainfluenza virus infection, Hymenolepiasis, Epstein-Barr Virus Infectious Mononucleosis (Mono), influenza (flu), isosporiasis, kawasaki disease, keratitis, kingella kingae infection, kuru, lassa fever, legionellosis (legionnaires' disease), legionellosis (pontiac fever), leishmaniasis, leprosy, leptospirosis, listeriosis, lyme disease (lyme borreliosis), lymphatic filariasis (Elephantiasis), Lymphocytic choriomeningitis, Malaria, Marburg hemorrhagic fever (MHF), Measles, Middle East respiratory syndrome (MERS), melioidosis (Whitmore's disease), meningitis, meningococcal disease, metagonimiasis, microsporidiosis, molluscum contagiosum (MC), Monkeypox, Mumps, Murine typhus (Endemic typhus), Mycoplasma pneumonia, Mycetoma (disambiguation), Myiasis, Neonatal conjunctivitis (Ophthalmia neonatorum), (New) Variant Creutzfeldt-Jakob disease (vCJD, nvCJD), nocardiosis, onchocerciasis (River blindness), opisthorchiasis, paracoccidioidomycosis (South American blastomycosis), paragonimiasis, pasteurellosis, pediculosis capitis (head lice), pediculosis corporis (body lice), pediculosis pubis (pubic lice, crab lice), pelvic inflammatory disease (PID), pertussis (Whooping cough), plague, pneumococcal infection, pneumocystis pneumonia (PCP), pneumonia, poliomyelitis, prevotella infection, primary amoebic meningoencephalitis (PAM), progressive multifocal leukoencephalopathy, psittacosis, Q fever, rabies, relapsing fever, respiratory syncytial virus infection, rhinosporidiosis, rhinovirus infection, rickettsial infection, rickettsialpox, Rift Valley fever (RVF), Rocky Mountain spotted fever (RMSF), rotavirus infection, rubella, salmonellosis, SARS (Severe Acute Respiratory Syndrome), scabies, schistosomiasis, sepsis, shigellosis (Bacillary dysentery), shingles (Herpes zoster), smallpox (Variola), sporotrichosis, staphylococcal food poisoning, staphylococcal infection, strongyloidiasis, subacute sclerosing panencephalitis, syphilis, Taeniasis, Tetanus (Lockjaw), Tinea barbae (Barber's itch), Tinea capitis (Ringworm of the Scalp), Tinea corporis (Ringworm of the Body), Tinea cruris (Jock itch), Tinea manum (Ringworm of the Hand), Tinea nigra, Tinea pedis (Athlete's foot), Tinea unguium (Onychomycosis), Tinea versicolor (Pityriasis versicolor), Toxocariasis (Ocular Larva Migrans (OLM)), Toxocariasis (Visceral Larva Migrans (VLM)), Trachoma, Toxoplasmosis, Trichinosis, Trichomoniasis, Trichuriasis (Whipworm infection), Tuberculosis, Tularemia, Typhoid fever, Typhus fever, Ureaplasma urealyticum infection, Valley fever, Venezuelan equine encephalitis, Venezuelan hemorrhagic fever, Vibrio vulnificus infection, Vibrio parahaemolyticus enteritis, viral pneumonia, West Nile Fever, white piedra (Tinea blanca), Yersinia pseudotuberculosis infection, yersiniosis, yellow fever, Zika fever, or zygomycosis.

[0706] The IL-2 agents described herein are typically administered at a frequency that keeps a therapeutically effective level of IL-2 agents in the patient's system until the patient recovers. For example, the IL-2 agents may be administered at a frequency that achieves a serum concentration sufficient for at least about 1, 2, 5, 10, 20, 30, or 40 agents to bind each target molecule or cell. In an embodiment, the IL-2 agent is administered every 1, 2, 3, 4, 5, 6, or 7 days, every 1, 2, 3, 4, 5, or 6 weeks, or every 1, 2, 3, 4, 5, or 6 months. In an embodiment, the IL-2 agent is administered once a month. In an embodiment, the IL-2 agent is administered once a week.

[0707] Methods of administering various agents (e.g., antibody molecules or fusion proteins) are known in the art and are described below. Suitable dosages of the agents used will depend on the age and weight of the subject and the particular drug used.

[0708] In an embodiment, the ratio of regulatory T cells (Tregs) to non-regulatory T cells within the subject (e.g., in the peripheral blood of the subject) increases after the administration. In an embodiment, the ratio of regulatory T cells (Tregs) to non-regulatory T cells within the subject (e.g., in the peripheral blood of the subject) remains essentially the same after the administration.

[0709] The IL-2 agents can be used by themselves or conjugated to a second agent, e.g., a protein, e.g., an antibody molecule, a polymer (e.g., polyethylene glycol (PEG)), or a cytokine. In an embodiment, the second agent comprises a second IL-2 agent. This method includes: administering the IL-2 agent, alone or conjugated to a second agent, to a subject requiring such treatment.

### Systemic Lupus Erythematosus

[0710] The IL-2 agents (e.g., IL-2 variants, IL-2 fusion proteins (e.g., IL-2-Fc fusion proteins), IL-2 complexes, or IL-2 conjugates) described herein, as well as the pharmaceutical compositions disclosed herein, can be used to treat systemic lupus erythematosus (SLE).

[0711] SLE is a systemic autoimmune vasculitic disease typically characterized by immune complexes containing autoantibodies (anti-nuclear antibodies (ANA), anti-dsDNA) to self-nuclear antigens and failure of self-tolerance. SLE can affect multiple organ systems, and consequently has a range of clinical manifestations, including cutaneous, neurologic, musculoskeletal, cardiac, and kidney manifestations. Up to 50% of patients with SLE develop lupus nephritis, which comprises a spectrum of inflammatory kidney manifestations. Control of auto-reactive T cells is important to immune tolerance and reduced IL-2 and Treg can play a role in the pathogenesis of SLE and lupus nephritis. Without wishing to be bound by theory, it is believed that in some embodiments preferential Treg expansion with minimal NK cell expansion can provide clinical benefits in SLE and lupus nephritis, with reduced risk of adverse effects.

[0712] Exemplary symptoms of SLE include severe fatigue, joint pain, joint swelling, headaches, a rash on the cheeks and nose, which is called a “butterfly rash”, hair loss, anemia, blood-clotting problems, fingers turning white or blue and tingling when cold, which is known as Raynaud's phenomenon. Other exemplary symptoms may depend on the part of the body the disease is attacking, such as the digestive tract, the heart, or the skin.

[0713] Diagnosis of SLE can be based on antinuclear antibody (ANA), complete blood count (CBC), chest X-ray, serum creatinine, and urinalysis.

[0714] In an embodiment, an IL-2 agent described herein is used in combination with a different therapeutic agent or modality for treating SLE in a subject.

### Lupus Nephritis

[0715] The IL-2 agents (e.g., IL-2 variants, IL-2 fusion proteins (e.g., IL-2-Fc fusion proteins), IL-2 complexes, or IL-2 conjugates) described herein, as well as the pharmaceutical compositions disclosed herein, can be used to treat lupus nephritis. Lupus nephritis is an autoimmune disorder that is a form of glomerulonephritis that can constitute the most severe organ manifestation of systemic lupus erythematosus (SLE). Lupus nephritis leads to autoantibodies in the kidney, e.g., antibodies to nucleic acid containing particles (anti-nuclear antibodies (ANA)), which causes inflammation, e.g., inflammation in the nephrons, and impairs kidney function, e.g., waste removal and filtration. It can result in permanent scarring and damage to the kidneys and possibly end-stage renal disease (ESRD). Lupus nephritis often develops in a subject within five years of developing lupus. In an embodiment, lupus, e.g., SLE and/or lupus nephritis, can result from a combination of factors, e.g., genetic, environmental, immunoregulatory, hormonal, and/or epigenetic factors.

[0716] Imbalance of T cells due to IL-2 deprivation can amplify murine lupus and IL-2 can restore Treg:Tcon balance and impede disease progression. Adoptive transfer of ex vivo expanded regulatory T cells can suppress disease in lupus-prone mice. Lower number of Tregs are typically associated with patients with active SLE and Tregs can decline during flare and increase during remission.

[0717] There is unmet need for better treatment in lupus nephritis. For example, conventional immunosuppressive treatments are not uniformly effective. Even in patients who respond, 35% may relapse. 5-20% of patients with lupus nephritis develop End-stage kidney disease (ESKD) within 10 years from the initial event. Drug-induced toxicity remains a concern, one of the commonest cause of mortality and morbidity is infections.

[0718] Exemplary symptoms of lupus nephritis include, but are not limited to, blood in the urine (hematuria), proteinuria, foamy urine (e.g., foamy urine due to excess protein in the urine), increased urination, edema, Reynaud syndrome, joint pain, pericarditis and effusion, arthritis, pleural effusion, high blood pressure, swelling in hands, ankles, and feet, excess levels of creatine in the blood, muscle pain, weight gain, fever of unknown etiology, neurological complications, and a red rash that is typically localized to the face (e.g., across the nose and face).

[0719] Diagnosis of lupus nephritis can be based on urinalysis and the measurement of blood, cell casts (e.g., cell fragments often found in the blood and/or the tubules of the kidneys), and protein levels in the urine. Diagnosis can also be based on a blood test to estimate kidney function, e.g., a creatine blood test with or without a blood urea nitrogen (BUN) test. Additionally, to test kidney function, the person's estimated glomerular filtration rate (eGFR) can be measured from a blood sample. A kidney biopsy can also be performed, which can be used to stage lupus nephritis. In an embodiment, lupus nephritis is classified as one of six stages under the International Society of Nephrology/Renal Pathology Society (ISN/RPS) classification system, which include, minimal mesangial lupus nephritis (Class I), mesangial proliferative lupus nephritis (Class II), focal lupus nephritis (<50% of all glomeruli) (Class III), diffuse segmental or global lupus nephritis (≥50% of all glomeruli) (Class IV), membranous lupus nephritis (Class V), or advanced sclerosing lupus nephritis (>90% of all glomeruli) (Class VI).

[0720] In an embodiment, an IL-2 agent described herein is used in combination with a different therapeutic agent or modality for treating lupus nephritis in a subject.

### Psoriasis

[0721] The IL-2 agents (e.g., IL-2 variants, IL-2 fusion proteins (e.g., IL-2-Fc fusion proteins), IL-2 complexes, or IL-2 conjugates) described herein, as well as the pharmaceutical compositions disclosed herein, can be used to treat psoriasis. Psoriasis is an autoimmune disorder driven by the innate and adaptive cutaneous immune responses, that affects the skin. Psoriasis generally results from sustained inflammation that leads to uncontrolled keratinocyte proliferation and dysfunctional differentiation. Inflammation resulting from psoriasis can affect additional organs and tissues in the subject and can develop into psoriatic arthritis. Further, psoriasis patients tend to exhibit increased hyperlipidemia, hypertension, coronary artery disease, type 2 diabetes, and increased body mass index. In an embodiment, psoriasis can result from a combination of factors, e.g., genetic, epigenetic, and/or immunoregulatory factors.

[0722] Exemplary symptoms of psoriasis include red patches of skin covered with thick, silvery scales, raised plaques on the skin, small scaling spots, dry and cracked skin, itching, bleeding of the skin (due, e.g., to cracking and dry skin), thickened/pitted or ridged nails, and swollen/stiff joints. In some embodiments, psoriasis is localized to on location on the skin or on the body. In an embodiment, psoriasis is generalized, e.g., located on one or more, e.g., multiple areas, and/or large areas of the body/skin, including but not limited to the lower back, elbows, eyelids, nails, skin folds, ears, lips, knees, legs, feet, scalp, face and/or palms.

[0723] Diagnosis of psoriasis can be based on a skin examination and/or skin biopsy. In an embodiment, psoriasis is classified as one of four different types, which include, psoriasis vulgaris (chronic plaque-type psoriasis characterized by sharply demarcated, erythematous, pruritic plaques covered in silvery scales that can coalesce and cover large areas of skin); inverse psoriasis (affects intertriginous locations, and is characterized clinically by slightly erosive erythematous plaques and patches); guttate psoriasis (acute onset of small erythematous plaques); and pustular psoriasis (characterized by multiple, coalescing sterile pustules). In an embodiment, guttate psoriasis progresses to plaque psoriasis. In an embodiment, pustular psoriasis can be localized or generalized. In an embodiment, pustular psoriasis can comprise psoriasis pustulosa palmoplantaris (PPP) or acrodermatitis continua of Hallopeau (ACS). In an embodiment, PPP and acrodermatitis continua of ACS affect the hands and feet, with PPP restricted to the palms and soles, and ACS more distally located at the tips of fingers and toes, such as at the nail apparatus. In an embodiment, generalized pustular psoriasis presents with an acute and rapidly progressive course characterized by diffuse redness and subcorneal pustules, and can often be accompanied by systemic symptoms. In an embodiment, psoriasis can be classified as an erythrodermic psoriasis, which is typically an acute condition in which over 90% of the total body surface is erythematous and inflamed. In an embodiment, erythroderma can develop on any kind of psoriasis subtype.

[0724] In an embodiment, an IL-2 agent described herein is used in combination with a different therapeutic agent or modality for treating psoriasis in a subject.

### Autoimmune Hepatitis

[0725] The IL-2 agents (e.g., e.g., IL-2 variants, IL-2 fusion proteins (e.g., IL-2-Fc fusion proteins), IL-2 complexes, or IL-2 conjugates) described herein, as well as the pharmaceutical compositions disclosed herein, can be used to treat autoimmune hepatitis. Autoimmune hepatitis is an autoimmune disorder that affects the liver, resulting in progressive and chronic inflammation as well as liver damage. It can result in permanent scarring and cirrhosis of the liver and/or liver failure. In an embodiment, autoimmune hepatitis can be characterized by a T cell-mediated immune response against liver autoantigens that results from a loss of regulatory immune control and tolerance. In an embodiment, autoimmune hepatitis can result from a from a combination of factors, e.g., genetic, environmental, dietary, and immunoregulatory factors. In an embodiment, autoimmune hepatitis can result from an unknown etiology.

[0726] There are three subtypes: AIH type 1 is characterized by the presence of ANA and/or anti-smooth muscle antibody (SMA) autoantibodies. AIH type 2 is characterized by anti-LKM-1 autoantibodies, and a lower frequency of anti-LKM-3 autoantibodies (with or without ANA or SMA autoantibodies). AIH type 3 is characterized by autoantibodies against SLA/LP (with or without ANA or SMA autoantibodies). AIH Type 1 occurs predominantly in adults while Type 2 is generally observed in a younger, pediatric population. AIH most commonly presents with acute hepatitis, which may progress to cirrhosis and end-stage liver disease. AIH may also be associated with other autoimmune diseases such as thyroiditis, inflammatory bowel disease, type 1 diabetes mellitus, and Addison's disease.

[0727] Hepatic inflammation typically depends on the balance between T effector cells and Tregs. Biopsy is required for diagnosis and modulation of treatment and interface hepatitis is often the hallmark finding in biopsy. AIH patients can have lower IL-2 levels and Tregs respond well to IL-2 supplement. Without wishing to be bound by theory, it is believed that in an embodiment, T cells (both Tregs and T effector cells) play a role in the development and persistence of AIH. For example, impaired Treg function and the ratio of Tregs to T effector cells in inflamed liver tissue may serve as potential drivers of disease. Without wising to be bound by theory, it is believed that in some embodiments, preferential Treg expansion with minimal NK cell expansion can provide clinical benefits in AIH, with reduced risk of adverse effects associated with chronic immunosuppressive maintenance therapy.

[0728] There is unmet need for better treatment in autoimmune hepatitis. Steroid based therapies are considered to be the standard of care. Relapse after treatment cessation is almost universal (e.g., between 25% and 100%). Chronic azathioprine use can be associated with risk of infection and cancer.

[0729] Exemplary symptoms of autoimmune hepatitis include, but are not limited to, joint pain, lethargy, nausea, poor appetite, pain over the liver in the upper abdomen, jaundice of the eyes and skin, dark colored urine, rash, psoriasis, vitiligo, acne, fatigue, spider angiomas, hepatomegaly, rectal bleeding or vomiting, unexplained weight loss, pruritis, edema of lower legs, ankles, or feet, and bloating from a buildup of fluid in the abdomen. In an embodiment, autoimmune hepatitis results in increased levels of the serum transaminase, IgG levels, autoantibodies, liver interface hepatitis, and/or liver enzymes, alanine transaminase (ALT) and an aspartate transaminase (AST). In an embodiment, autoimmune hepatitis results in decreased levels of IL-2.

[0730] Diagnosis of autoimmune hepatitis can be based on a laboratory test and/or liver function test, e.g., a blood test, a liver biopsy, an ultrasound, a Doppler ultrasonography, a CT and/or an MRI and cholangiography (x-rays of the bile ducts). In an embodiment, the blood test include one or more of a coagulation test (e.g., to measure clotting factors), a complete blood count (CBC), an electrolyte panel, a serum bilirubin test, a serum albumin test, a serum alkaline phosphatase test, a serum aminotransferases (transaminases) test, a prothrombin time (PTT) test, an alanine transaminase (ALT) test, an aspartate transaminase (AST) test, gamma-glutamyl transpeptidase test, a lactic dehydrogenase test, a 5-nucleotidase test, an alpha-fetoprotein test, and a mitochondrial antibodies test. In an embodiment, diagnosis of autoimmune hepatitis includes a measure of autoimmune antibodies, e.g., antinuclear antibodies (ANA) and anti-smooth muscle antibodies (SMA).

[0731] In an embodiment, diagnosis of autoimmune hepatitis comprises quantifying a Revised Diagnostic Criteria (RDC) score. In an embodiment, quantification of an RDC score comprises one or more of the following criteria: gender (e.g., being a female); ratio of alkaline phosphatase levels to aspartate aminotransferase or alanine aminotransferase levels; γ-globulin or IgG levels; ANA, SNA and anti-liver kidney microsomal type I (anti-LKM1) antibody titers, anti-mitochondrial antibody positivity, viral serological markers, use of drugs with hepatoxic potential, alcohol use, HLADR3 or HLADR4 genotypes, concurrent immunological diseases (e.g., thyroiditis and/or colitis), and/or histological features (e.g., presence or absence of interface hepatitis, plasma cells, rosettes, and/or biliary changes). In an embodiment, an aggregate RDC score of >15 points is classified as autoimmune hepatitis. In an embodiment, an aggregate RDC score of 10-15 is classified as probable autoimmune hepatitis.

[0732] In an embodiment, diagnosis of autoimmune hepatitis comprises quantifying a Simplified Diagnostic Criteria (SDC) score. In an embodiment, an SDC aggregate score of ≥7 is classified as autoimmune hepatitis. In an embodiment, an SDC aggregate score of ≥6 is classified as probable autoimmune hepatitis. In an embodiment, quantification of an SDC score comprises one or more of the following criteria: presence of autoantibodies (e.g., ANA, SNA and/or anti-LKM1 antibodies), immunoglobulin levels (e.g., levels of γ-globulin or IgG), viral hepatitis, and/or histological features compatible with autoimmune hepatitis.

[0733] In an embodiment, autoimmune hepatitis can be classified as Type I autoimmune hepatitis. Type I autoimmune hepatitis can occur at an any age. In an embodiment, Type I autoimmune hepatitis can often be associated with other autoimmune disorders, e.g., thyroiditis, inflammatory bowel disease, type I diabetes, Addison's disease. In an embodiment, autoimmune hepatitis can be classified as Type II autoimmune hepatitis. Type II autoimmune hepatitis can be more common in children and younger adults. In an embodiment, Type II autoimmune hepatitis may be associated with other autoimmune disorders, thyroiditis, inflammatory bowel disease, type I diabetes, Addison's disease.

[0734] In an embodiment, an IL-2 agent described herein is used in combination with a different therapeutic agent or modality for treating autoimmune hepatitis in a subject.

### Nephrotic Syndrome

[0735] The IL-2 agents (e.g., e.g., IL-2 variants, IL-2 fusion proteins (e.g., IL-2-Fc fusion proteins), IL-2 complexes, or IL-2 conjugates) described herein, as well as the pharmaceutical compositions disclosed herein, can be used to treat nephrotic syndrome, e.g., an idiopathic nephrotic syndrome. Nephrotic syndrome is a collection of symptoms that indicate kidney damage, which include but are not limited to, albuminuria (increased protein in the urine), hyperlipidemia (higher than normal fat and cholesterol levels in the blood), edema (e.g., usually in the legs, feet, ankles and less often in the hands or face), and/or hypoalbuminemia (low levels of albumin in the blood). In an embodiment, nephrotic syndrome results from damage to the glomeruli of the kidneys, which impairs kidney function, e.g., waste removal and filtration. In an embodiment, in nephrotic syndrome, the damaged glomeruli allow at least about 3 grams or more of protein to leak into the urine, as measured over a 24-hour period. In an embodiment, nephrotic syndrome can lead to other health problems, e.g., anemia, heart disease, high blood pressure, fluid buildup, blood clots, infections, malnutrition, stroke, heart attack, acute kidney injury, chronic kidney disease, kidney failure, and/or end-stage renal disease (ESRD).

[0736] In an embodiment, nephrotic syndrome results from systemic T-cell dysregulation, e.g., a reduction of CD4+ T helper cells and increased prevalence of CD8+ cytotoxic T cells; imbalance between Th2 and Th1 cells with increased production of IL-13, and/or reduced frequency and/or function of T regulatory cells.

[0737] In an embodiment, nephrotic syndrome is the result of other diseases that affect the kidneys, e.g., focal segmental glomerulosclerosis (FSGS), minimal change disease (MCD), IgA nephropathy, lupus nephritis, and membranous nephropathy. In an embodiment, nephrotic syndrome is the result of systemic diseases that affect the whole body including but not limited to the kidneys, e.g., diabetes, amyloidosis, and/or lupus (e.g., systemic lupus erythematosus (SLE) and/or lupus nephritis). In an embodiment, idiopathic neuropathy results from MCD or Primary FSGS. In an embodiment, focal segmental glomerulosclerosis (FSGS) is the most common etiology of idiopathic nephrotic syndrome in adults. In an embodiment, minimal change disease (MCD) is the most common etiology of idiopathic nephrotic syndrome in children. In an embodiment, MCD results in decreased levels of T regulatory cells, T regulatory cell-related cytokines (e.g., TGF-β1 and IL-10), and T regulatory cell-related transcription factors (e.g., FOXP3). In an embodiment, increasing the number of T regulatory cells can induce remission of FSGS.

[0738] Exemplary symptoms of nephrotic syndrome include, but are not limited to, edema, foamy urine (e.g., foamy urine due to excess protein in the urine), weigh gain (e.g., weight gain due to excessive fluid retention), fatigue, and loss of appetite.

[0739] Diagnosis of nephrotic syndrome can be based on urinalysis and the measurement of blood, cell casts (e.g., cell fragments often found in the blood and/or the tubules of the kidneys), albumin and/or creatine levels in the urine, and protein levels in the urine. Diagnosis can also be based on a blood test to estimate kidney function, e.g., a creatine blood test with or without a blood urea nitrogen (BUN) test. Additionally, to test kidney function, the person's estimated glomerular filtration rate (eGFR) can be measured from a blood sample. A kidney biopsy can also be performed.

[0740] Nephrotic syndrome can typically be treated by steroids, but relapse is common and often requires use of one or more additional therapies.

[0741] In an embodiment, an IL-2 agent described herein is used in combination with a different therapeutic agent or modality for treating nephrotic syndrome in a subject.

### Immune-mediated Focal Segmented Glomerulosclerosis (IM-FSGS)

[0742] The IL-2 agents (e.g., e.g., IL-2 variants, IL-2 fusion proteins (e.g., IL-2-Fc fusion proteins), IL-2 complexes, or IL-2 conjugates) described herein, as well as the pharmaceutical compositions disclosed herein, can be used to treat focal segmented glomerulosclerosis (FSGS), e.g., immune-mediated FSGS (IM-FSGS). FSGS is a histopathologic lesion describing segmental glomerular scarring in distinct, focal areas of the kidney, typically resulting from a spectrum of underlying etiologies. Immune-mediated FSGS (IM-FSGS) is a sub-population of FSGS that arises in the absence of known causes such as human immunodeficiency virus or specific nephrotoxic agents, and is generally characterized by incomplete response to immunosuppression. FSGS patients with persistent dependence on immunosuppressive therapy have an increased risk of progression to end stage kidney disease, as well as a higher probability of experiencing recurrence of FSGS after transplantation (often within the first-year post-transplant), despite aggressive standard of care pre- & peri-transplant therapy with plasmapheresis. In contrast, non-IM-FSGS (e.g., resulting from genetic mutations in critical glomerular structural proteins) is typically resistant to immunosuppression, and does not typically recur after transplantation.

[0743] Immunosuppression-resistant FSGS typically results from monogenic mutations that cause structural defects in the glomerular filtration barrier. Many such mutations are known (over 80 have been identified, e.g., NPHS1, NPHS2, ACTN4, TRPC6, CD2AP, PLCE1), while some familial FSGS cohorts likely harbor as yet undiscovered mutations.

[0744] In contrast, immunosuppression-responsive FSGS likely represents the sub-population of IM-FSGS patients. This group is further defined by the response to initial courses of steroid therapy and other second line immunosuppression (e.g., calcineurin inhibitors, cyclophosphamide, rituximab, and mycophenolate mofetil). IM-FSGS patients with steroid-sensitive nephrotic syndrome (SSNS) remain in remission after completing a course and taper of steroid therapy, while patients with the steroid-dependent or frequently relapsing nephrotic syndrome (SDNS/FRNS) form of IM-FSGS require chronic steroid therapy to repeatedly achieve or maintain remission. FRNS often progresses to secondary steroid-resistant nephrotic syndrome (SRNS) that may respond to second line immunosuppression.

[0745] While the terms “FSGS” and “minimal change disease” (MCD) are typically associated with SRNS and SSNS, respectively, there are numerous contradictory instances. More likely, a histologic diagnosis of MCD reflects an earlier stage of the disease, prior to more extensive focal involvement of the kidney, and may be the result of statistical sampling given the limitations of kidney biopsies (Schachter, Pediatr Nephrol 21, 953-957, 2006; Maas et al., Nat Rev Nephrol (12):768-776, 2016). Therefore, SSNS/SDNS/FRNS patients with biopsy findings showing either MCD or FSGS are included in the definition of IM-FSGS, and henceforth the term “IM-FSGS” will implicitly include immune-mediated MCD.

[0746] Tregs play a key role in the pathogenesis of IM-FSGS. Without wishing to be bound by theory, it is believed that in some embodiments Treg expansion can provide significant clinical benefits in IM-FSGS (both native kidney and post-transplant), allowing for higher rates of remission with reduced or no steroid therapy.

[0747] Exemplary symptoms of FSGS include swelling in body parts like legs, ankles and around eyes (edema), weight gain due to extra fluid building in the body, foamy urine caused by high protein levels in the urine (proteinuria), high fat levels in the blood (high cholesterol), and low levels of protein in the blood. FSGS can cause nephrotic syndrome.

[0748] Diagnosis of FSGS can be based on urine test, blood test, glomerular filtration rate (GFR), and kidney biopsy.

[0749] In an embodiment, an IL-2 agent described herein is used in combination with a different therapeutic agent or modality for treating IM-FSGS in a subject.

### Alopecia Areata

[0750] The IL-2 agents (e.g., e.g., IL-2 variants, IL-2 fusion proteins (e.g., IL-2-Fc fusion proteins), IL-2 complexes, or IL-2 conjugates) described herein, as well as the pharmaceutical compositions disclosed herein, can be used to treat alopecia areata (AA). AA is an autoimmune disorder typically resulting in inflammation induced hair loss. The most common patterns include patchy alopecia areata (small round or patchy bald lesion, usually on the scalp), alopecia totalis (total loss of scalp hair only), and alopecia universalis (total loss of all body hair). Alopecia areata affects approximately 4.5 million people in the United States, with most under the age of 30 years, and can impart significant emotional distress in this mostly young adult population. Systemic therapy with immunosuppressive therapy is the primary standard of care for more extensive AA, although topical therapy may also be co-administered. JAK inhibitors are the key investigational agents in clinical trials of AA, however chronic use may be limited by safety concerns such as leukopenia, elevated liver enzymes, and thromboembolic events. Without wishing to be bound by theory, it is believed that in some embodiments, preferential Treg expansion can provide clinical benefits in AA, with reduced risk of the adverse effects that may accompany JAK inhibitor therapy.

[0751] Exemplary symptoms of AA include hair loss.

[0752] Diagnosis of AA can be based on extent of hair loss, scalp biopsy, and blood tests.

[0753] In an embodiment, an IL-2 agent described herein is used in combination with a different therapeutic agent or modality for treating AA in a subject.

### Combination Therapies

[0754] The IL-2 agents (e.g., e.g., IL-2 variants, IL-2 fusion proteins, IL-2 complexes, or IL-2 conjugates) described herein, as well as the pharmaceutical compositions disclosed herein, can be used in combination with other therapies.

[0755] For example, the combination therapy can include an IL-2 agent described herein co-formulated with, and/or co-administered with, one or more additional therapeutic agents, e.g., one or more additional therapeutic agents described herein. In other embodiments, the IL-2 agents are administered in combination with other therapeutic treatment modalities, e.g., other therapeutic treatment modalities described herein. Such combination therapies may advantageously utilize lower dosages of the administered therapeutic agents, thus avoiding possible toxicities or complications associated with the various monotherapies.

[0756] Administered “in combination,” as used herein, means that two (or more) different treatments are delivered to the subject before, or during the course of the subject's affliction with a disorder. In an embodiment, two or more treatments are delivered prophylactically, e.g., before the subject has the disorder or is diagnosed with the disorder. In another embodiment, the two or more treatments are delivered after the subject has developed or diagnosed with the disorder. In an embodiment, the delivery of one treatment is still occurring when the delivery of the second begins, so that there is overlap. This is sometimes referred to herein as “simultaneous” or “concurrent delivery.” In other embodiments, the delivery of one treatment ends before the delivery of the other treatment begins. In an embodiment of either case, the treatment is more effective because of combined administration. For example, the second treatment is more effective, e.g., an equivalent effect is seen with less of the second treatment, or the second treatment reduces symptoms to a greater extent, than would be seen if the second treatment were administered in the absence of the first treatment, or the analogous situation is seen with the first treatment. In an embodiment, delivery is such that the reduction in a symptom, or other parameter related to the disorder is greater than what would be observed with one treatment delivered in the absence of the other. The effect of the two treatments can be partially additive, wholly additive, or greater than additive. The delivery can be such that an effect of the first treatment delivered is still detectable when the second is delivered.

[0757] In an embodiment, the IL-2 agent is administered in combination with a second therapy (e.g., an additional agent) to treat or prevent a disorder described herein. In an embodiment, the additional agent is a second IL-2 agent, e.g., an IL-2 agent different from a first IL-2 agent. Exemplary IL-2 agents that can be used in combination include, but are not limited to, any combination of the IL-2 agents described herein. In another embodiment, the additional agent is other than an IL-2 agent. For example, the additional agent can be a small molecule or a nucleic acid molecule. In yet another embodiment, the second therapy is chosen from a surgery, a radiation therapy, a cell therapy (e.g., a stem cell therapy), or an organ or tissue transplantation.

[0758] In an embodiment, the second therapy comprises a therapy chosen from one or more of: an androgen replacement therapy, an antihormone therapy, an antiserum therapy, an autologous immune enhancement therapy, a biotherapy, a blood irradiation therapy, a brachytherapy, a cardiac resynchronization therapy, a cell therapy, a cell transfer therapy, a chelation therapy, a chemotherapy, a chrysotherapy, a cobalt therapy, a cold compression therapy, a cryotherapy, an electroconvulsive therapy, an electromagnetic therapy, an electron therapy, an electrotherapy, an enzyme replacement therapy, an epigenetic therapy, an estrogen replacement therapy, an extracorporeal shockwave therapy, a fast neutron therapy, a fluoride therapy, a gene therapy, a heat therapy, a helminthic therapy, a hormone therapy, a hormone replacement therapy, a host modulatory therapy, a hyperbaric oxygen therapy, a hyperthermia therapy, an immunosuppressive therapy, an immunotherapy, an intraoperative electron radiation therapy, an intraoperative radiation therapy, an inversion therapy, a laser therapy, a light therapy, a lithium therapy, a low level laser therapy, a magnet therapy, a magnetic resonance therapy, a medical gas therapy, a medical nutrition therapy, a molecular chaperone therapy, a molecular therapy, a monoclonal antibody therapy, a negative air ionization therapy, a neutron capture therapy, a neutron therapy, an oral rehydration therapy, an osmotherapy, an oxygen therapy, an ozone therapy, a palliative therapy, a particle therapy, a phage therapy, a phonemic neurological hypochromium therapy, a photodynamic therapy, a phototherapy, a photothermal therapy, a physical therapy, a prolotherapy, a protein therapy, a proton therapy, a pulsed electromagnetic field therapy, a PUVA therapy, a radiation therapy, a rehydration therapy, a respiratory therapy, salvage therapy, a serotherapy, a stem cell therapy, a stereotactic radiation therapy, a targeted therapy, a thermotherapy, a TK cell therapy, a tolerogenic therapy, a transdermal continuous oxygen therapy, an ultraviolet light therapy, or a virotherapy.

[0759] Exemplary therapies that can be used in combination with an IL-2 agent described herein to treat or prevent other disorders are also described in the section of “Methods of Treating or Preventing Disorders” herein.

[0760] The present disclosure includes any of the following numbered paragraphs:

1. A method of treating a disorder, comprising:

[0761] administering to a subject in need thereof an effective amount of an IL-2 agent described herein, such that the level of phosphor-STAT5 (p-STAT5) signaling in a Treg cell from the subject is increased, thereby treating the disorder.

2. The method of paragraph 1, wherein the level of p-STAT5 signaling in a NK cell and/or a cytotoxic T cell from the subject in not substantially increased.
3. A method of increasing p-STAT5 signaling, comprising:

[0762] contacting a Treg cell from a subject having a disorder with an IL-2 agent described herein in an amount sufficient to increase the level of p-STAT5 signaling in the Treg cell, compared to a reference level of p-STAT5 signaling.

[0763] wherein the reference level is the level of p-STAT5 signaling in a Treg cell from a subject who does not have the disorder, and wherein the Treg cell from the subject who does not have the disorder has been contacted with the same amount of the IL-2 agent,

[0764] thereby increasing p-STAT5 signaling.

4. A method of selectively increasing p-STAT5 signaling, comprising:

[0765] administering to a subject in need thereof an effective amount of an IL-2 agent described herein,

[0766] such that the level of p-STAT5 signaling in a Treg cell from the subject is increased and the level of p-STAT5 signaling in a NK cell and/or a cytotoxic T cell from the subject is not substantially increased,

[0767] thereby selectively increasing p-STAT5 signaling.

5. The method of any of paragraphs 1-4, wherein the level of p-STAT5 signaling in the Treg cell is increased by at least 2, 3, 4, 5, 6, 7, 8, 9, or 10 fold.
6. The method of any of paragraphs 2 or 4-5, wherein the level of p-STAT signaling in the NK cell and/or cytotoxic T cell is increased by no more than 50%, 40%, 30%, 20%, or 10%.
7. The method of any of paragraphs 1-6, wherein the disorder is, or the subject has, lupus nephritis.
8. The method of any of paragraphs 1-6, wherein the disorder is, or the subject has, psoriasis.
9. The method of any of paragraphs 1-6, wherein the disorder is, or the subject has, an autoimmune disorder, e.g., an autoimmune disorder described herein.
10. The method of any of paragraphs 1-6, wherein the disorder is, or the subject has, systemic lupus erythematosus (SLE), autoimmune hepatitis (AIH), immune-related focal segmented glomerulosclerosis (IM-FSGS), or alopecia areata (AA).
11. The method of any of paragraphs 1-10, further comprising determining the level of p-STAT5 signaling in an immune cell (e.g., in a T reg cell, an NK cell, and/or a cytotoxic T cell) from the subject.
12. The method of any of paragraphs 1-11, further comprising isolating a blood cell (e.g., a PBMC) from the subject.
13. The method of paragraph 11 or 12, wherein the determining step is performed prior to, during, and/or subsequent to the contacting or administering step.
14. The method of any of paragraphs 11-13, wherein the level of p-STAT5 signaling is determined using a flow cytometry-based p-STAT5 assay, e.g., as described in Example 13.
15. The method of any of paragraphs 1-14, wherein the IL-2 agent comprises an IL-2 variant comprising:

[0768] (i) the amino acid substitution H16L or H16N, and/or the amino acid substitution I92S, and

[0769] (ii) the amino acid substitutions V69A, Q74P, and C125S,

[0770] corresponding to human IL-2 (SEQ ID NO: 1031).

16. The method of paragraph 15, wherein the IL-2 variant further comprises the amino acid substitution T3A.
17. The method of paragraph 15 or 16, wherein the IL-2 variant comprises the amino acid sequence of any of SEQ ID NOs: 4, 5, 11, 1000, 1001, or 1002, an amino acid sequence that is at least 95% identical thereto or differs by no more than 1, 2, 3, 4, or 5 amino acids therefrom, or a functional fragment thereof.
18. The method of any of paragraphs 15-17, wherein the IL-2 agent comprises an IL-2 fusion protein comprising the IL-2 variant.
19. The method of paragraph 18, wherein the IL-2 fusion protein further comprises an Fc region.
20. The method of paragraph 19, wherein the Fc region comprises an Fc region of IgG1 allotype m3 comprising an N297G substitution according to EU numbering.
21. The method of paragraph 19 or 20, wherein the Fc region comprises the amino acid sequence of SEQ ID NO: 1003, or an amino acid sequence that is at least 95% identical thereto or differs by no more than 1, 2, 3, 4, 5, 6, 7, 8, 9, or 10 amino acids therefrom, or a functional fragment thereof.
22. The method of any of paragraphs 19-21, wherein the Fc region is fused to the C-terminus of the IL-2 variant.
23. The method of any of paragraphs 19-22, wherein the IL-2 fusion protein further comprises a linker.
24. The method of paragraph 23, wherein the linker comprises (G₄S)₄ (SEQ ID NO: 48).
25. The method of any of paragraphs 19-24, wherein the fusion protein comprises an amino acid sequence of any of SEQ ID NOs: 1004, 1005, 1006, 1007, 1008, or 1009, an amino acid sequence that is at least 95% identical thereto or differs by no more than 1, 2, 3, 4, 5, 6, 7, 8, 9, or 10 amino acids therefrom, or a functional fragment thereof.
26. The method of any of paragraphs 19-25, wherein the fusion protein forms a dimer.
27. An IL-2 agent described herein for use in a method of any of paragraphs 1-26.
28. Use of an IL-2 agent described herein in the manufacture of a medicament for treating a disorder or increasing p-STAT5 signaling in accordance with a method of any of paragraphs 1-26.
29. A method of treating immune-related focal segmented glomerulosclerosis (IM-FSGS), comprising administering to a subject in need thereof an effective amount of an IL-2 agent described herein, thereby treating the disorder.
30. The method of paragraph 29, wherein the IL-2 agent comprises an IL-2 variant comprising:

[0771] (i) the amino acid substitution H16L or H16N, and/or the amino acid substitution I92S, and

[0772] (ii) the amino acid substitutions V69A, Q74P, and C125S,

[0773] corresponding to human IL-2 (SEQ ID NO: 1031).

31. The method of paragraph 30, wherein the IL-2 variant further comprises the amino acid substitution T3A.
32. The method of paragraph 30 or 31, wherein the IL-2 variant comprises the amino acid sequence of any of SEQ ID NOs: 4, 5, 11, 1000, 1001, or 1002, an amino acid sequence that is at least 95% identical thereto or differs by no more than 1, 2, 3, 4, or 5 amino acids therefrom, or a functional fragment thereof.
33. The method of any of paragraphs 30-32, wherein the IL-2 agent comprises an IL-2 fusion protein comprising the IL-2 variant.
34. The method of paragraph 33, wherein the IL-2 fusion protein further comprises an Fc region.
35. The method of paragraph 34, wherein the Fc region comprises an Fc region of IgG1 allotype m3 comprising an N297G substitution according to EU numbering.
36. The method of paragraph 34 or 35, wherein the Fc region comprises the amino acid sequence of SEQ ID NO: 1003, or an amino acid sequence that is at least 95% identical thereto or differs by no more than 1, 2, 3, 4, 5, 6, 7, 8, 9, or 10 amino acids therefrom, or a functional fragment thereof.
37. The method of any of paragraphs 34-36, wherein the Fc region is fused to the C-terminus of the IL-2 variant.
38. The method of any of paragraphs 34-37, wherein the IL-2 fusion protein further comprises a linker.
39. The method of paragraph 38, wherein the linker comprises (G₄S)₄ (SEQ ID NO: 48).
40. The method of any of paragraphs 33-39, wherein the fusion protein comprises an amino acid sequence of any of SEQ ID NOs: 1004, 1005, 1006, 1007, 1008, or 1009, an amino acid sequence that is at least 95% identical thereto or differs by no more than 1, 2, 3, 4, 5, 6, 7, 8, 9, or 10 amino acids therefrom, or a functional fragment thereof.
41. An IL-2 agent described herein for use in a method of any of paragraphs 29-40.
42. Use of an IL-2 agent described herein in the manufacture of a medicament for treating immune-related focal segmented glomerulosclerosis (IM-FSGS) in accordance with a method of any of paragraphs 29-40.

[0774] The present disclosure also includes any of the following numbered paragraphs:

1. An interleukin-2 (IL-2) agent comprising a human IL-2 variant comprising an amino acid alteration (e.g., substitution) at one or more position(s) chosen from: T3, H16, 128, K35, R38, F42, E68, V69, Q74, D84, S87, N88, 192, C125, Q126, or a combination thereof.
2. The IL-2 agent of paragraph 1, comprising an amino acid alteration (e.g., substitution) at position V69, Q74, or a combination thereof.
3. The IL-2 agent of paragraph 1 or 2, comprising an amino acid alteration (e.g., substitution) at positions V69 and Q74.
4. The IL-2 agent of any one of paragraphs 1-3, wherein the amino acid substitution is V69A.
5. The IL-2 agent of any one of paragraphs 1-4, wherein the amino acid substitution is Q74P.
6. The IL-2 agent of any one of paragraphs 1-5, comprising an amino acid alteration (e.g., substitution) at position H16, 192, D84, or a combination thereof.
7. The IL-2 agent of any one of paragraphs 1-6, comprising an amino acid alteration (e.g., substitution) at position H16, optionally wherein the amino acid substitution is H16N, H16L, or H16D.
8. The IL-2 agent of paragraph 7, wherein the amino acid substitution is H16N.
9. The IL-2 agent of paragraph 7, wherein the amino acid substitution is H16L.
10. The IL-2 agent of any one of paragraphs 1-9, comprising an amino acid alteration (e.g., substitution) at position at 192, optionally wherein the amino acid substitution is I92S.
11. The IL-2 agent of any one of paragraphs 1-10, comprising an amino acid alteration (e.g., substitution) at position D84, optionally wherein the amino acid substitution is D84V.
12. The IL-2 agent of any one of paragraphs 1-11, comprising an amino acid alteration (e.g., substitution at position K35, R38, F42, E68, or a combination thereof.
13. The IL-2 agent of any one of paragraphs 1-12, comprising an amino acid alteration (e.g., substitution) at position K35, optionally wherein the amino acid substitution is K35E.
14. The IL-2 agent of any one of paragraphs 1-13, comprising an amino acid alteration (e.g., substitution) at position R38, optionally wherein the amino acid substitution is R38E, R38N or R38Q.
15. The IL-2 agent of paragraph 14, wherein the amino acid substitution is R38N.
16. The IL-2 agent of paragraph 15, wherein the amino acid substitution is R38Q.
17. The IL-2 agent of any one of paragraphs 1-16, comprising an amino acid alteration (e.g., substitution) at position F42, optionally wherein the amino acid substitution is F42K or F42Q.
18. The IL-2 agent of paragraph 17, wherein the amino acid substitution is F42Q.
19. The IL-2 agent of paragraph 1, comprising an amino acid alteration (e.g., substitution):

[0775] (i) at position V69 and Q74, and/or at position K35; and

[0776] (ii) at position H16, 192, or D84; and optionally

[0777] (iii) at position R38, F42, E68, or a combination thereof.

20. The IL-2 agent of paragraph 1, comprising an amino acid alteration (e.g., substitution):

[0778] (i) at position V69 and Q74, and/or at position K35; and

[0779] (ii) at position H16, 192, or D84; and

[0780] (iii) at position R38, F42, E68, or a combination thereof.

21. The IL-2 agent of paragraph 1, comprising an amino acid alteration (e.g., substitution):

[0781] (i) at position V69 and Q74, and/or at position K35; and

[0782] (ii) at position H16, 192, or D84; or

[0783] (iii) at position R38, F42, E68, or a combination thereof.

22. The IL-2 agent of paragraph 1, comprising an amino acid alteration (e.g., substitution):

[0784] (i) at position V69 and Q74; and/or at position K35; and

[0785] (ii) at position H16, 192, D84, or a combination thereof, and

[0786] (iii) at position R38, F42, E68, or a combination thereof.

23. The IL-2 agent of any one of paragraphs 19-22, comprising an amino acid alteration (e.g., substitution) at position V69, Q74, and H16, optionally wherein the amino acid substitution is V69A, Q74P, and H16N or H16L, respectively, optionally wherein the amino acid substitutions are V69A, Q74P, and H16L.
24. The IL-2 agent of any one of paragraphs 19-22, comprising an amino acid alteration (e.g., substitution) at position V69, Q74, and 192, optionally wherein the amino acid substitution is V69A, Q74P, and I92S, respectively.
25. The IL-2 agent of any one of paragraphs 19-22, comprising an amino acid alteration (e.g., substitution) at position V69, Q74, and D84, optionally wherein the amino acid substitution is V69A, Q74P, and D84V, respectively.
26. The IL-2 agent of paragraph 21, comprising an amino acid alteration (e.g., substitution) at position V69, Q74, and R38, optionally wherein the amino acid substitution is V69A, Q74P, and R38Q, respectively.
27. The IL-2 agent of paragraph 21, comprising an amino acid alteration (e.g., substitution) at position V69, Q74, and F42, optionally wherein the amino acid substitution is V69A, Q74P, and F42Q, respectively.
28. The IL-2 agent of paragraph 21, comprising an amino acid alteration (e.g., substitution) at position V69, Q74, and R38, optionally wherein the amino acid substitution is V69A, Q74P, and R38N, respectively.
29. The IL-2 agent of paragraph 21, comprising an amino acid alteration (e.g., substitution) at position V69, Q74, and R38, optionally wherein the amino acid substitution is V69A, Q74P, and R38E, respectively.
30. The IL-2 agent of any one of paragraphs 19-22, comprising an amino acid alteration (e.g., substitution) at position V69, Q74, K35, and H16, optionally wherein the amino acid substitution is V69A, Q74P, K35E, and H16N or H16L, respectively.
31. The IL-2 agent of paragraph 30, wherein the amino acid substitution is V69A, Q74P, K35E, and H16N.
32. The IL-2 agent of paragraph 30, wherein the amino acid substitution is V69A, Q74P, K35E, and H16L.
33. The IL-2 agent of any one of paragraphs 19, 20, or 22, comprising an amino acid alteration (e.g., substitution) at position V69, Q74, K35, H16, and R38, optionally wherein the amino acid substitution is V69A, Q74P, K35E, H16N, and R38N, respectively.
34. The IL-2 agent of any one of paragraphs 19, 20, or 22, comprising an amino acid alteration (e.g., substitution) at position V69, Q74, H16, and R38, optionally wherein the amino acid substitution is V69A, Q74P, H16N or H16L, and R38N or R38Q, respectively, optionally wherein the amino acid substitutions are V69A, Q74P, H16N or H16L, and R38Q.
35. The IL-2 agent of paragraph 34, wherein the amino acid substitutions are V69A, Q74P, H16L, and R38Q.
36. The IL-2 agent of any one of paragraphs 1-35, comprising an amino acid alteration (e.g., substitution) at position 128, E68, S87, N88, Q126, or a combination thereof.
37. The IL-2 agent of any one of paragraphs 1-36, comprising an amino acid alteration (e.g., substitution) at position 128, optionally wherein the amino acid substitution is I28T or I28F.
38. The IL-2 agent of any one of paragraphs 1-37, comprising an amino acid alteration (e.g., substitution) at position E68, optionally wherein the amino acid substitution is E68Q or E68N.
39. The IL-2 agent of any one of paragraphs 1-38, comprising an amino acid alteration (e.g., substitution) at position S87, optionally wherein the amino acid substitution is S87R.
40. The IL-2 agent of any one of paragraphs 1-39, comprising an amino acid alteration (e.g., substitution) at position N88, optionally wherein the amino acid substitution is N88S, N88L, or N88D.
41. The IL-2 agent of any one of paragraphs 1-40, comprising an amino acid alteration (e.g., substitution) at position Q126, optionally wherein the amino acid substitution is Q126T, Q126K, or Q126R.
42. The IL-2 agent of any one of paragraphs 1-41, comprising an amino acid alteration (e.g., substitution) at positions C125.
43. The IL-2 agent of paragraph 42, wherein the amino acid substitution is C125S.
44. The IL-2 agent of any one of paragraphs 1-43, comprising an amino acid alteration (e.g., substitution) at position T3.
45. The IL-2 agent of paragraph 44, wherein the amino acid substitution is T3A.
46. The IL-2 agent of any one of paragraphs 1-45, comprising an amino acid alteration (e.g., substitution) at positions V69, Q74, and C125, optionally wherein the amino acid substitution is V69A, Q74P, and C125S, respectively.
47. The IL-2 agent of paragraph 46, further comprising an amino acid alteration (e.g., substitution) at position T3, H16, 192, or a combination thereof.
48. The IL-2 agent of paragraph 46 or 47, comprising an amino acid alteration (e.g., substitution) at positions H16, V69, Q74, and C125, optionally wherein the amino acid substitution is H16N or H16L, V69A, Q74P, and C125S, respectively.
49. The IL-2 agent of any of paragraphs 46-48, comprising an amino acid alteration (e.g., substitution) at positions H16, V69, Q74, and C125, optionally wherein the amino acid substitution is H16L, V69A, Q74P, and C125S, respectively.
50. The IL-2 agent of paragraph 48 or 49, wherein the amino acid substitution is H16L, V69A, Q74P, and C125S.
51. The IL-2 agent of paragraph 48, wherein the amino acid substitution is H16N, V69A, Q74P, and C125S.
52. The IL-2 agent of any of paragraphs 46-48, comprising an amino acid alteration (e.g., substitution) at positions H16, V69, Q74, 192, and C125, optionally wherein the amino acid substitution is H16L, V69A, Q74P, I92S, and C125S, respectively.
53. The IL-2 agent of paragraph 46 or 47, comprising an amino acid alteration (e.g., substitution) at positions T3, V69, Q74, and C125, optionally wherein the amino acid substitution is T3A, V69A, Q74P, and C125S, respectively.
54. The IL-2 agent of paragraph 53, comprising an amino acid alteration (e.g., substitution) at positions T3, H16, V69, Q74, and C125, optionally wherein the amino acid substitution is T3A, H16N or H16L, V69A, Q74P, and C125S, respectively.
55. The IL-2 agent of paragraph 53, comprising an amino acid alteration (e.g., substitution) at positions T3, V69, Q74, 192, and C125, optionally wherein the amino acid substitution is T3A, H16N, V69A, Q74P, I92S, and C125S, respectively.
56. The IL-2 agent of paragraph 1, wherein the human IL-2 variant comprises an amino acid sequence chosen from: SEQ ID NO: 2, SEQ ID NO: 3, SEQ ID NO: 4, SEQ ID NO: 5, SEQ ID NO: 6, SEQ ID NO: 7, SEQ ID NO: 8, SEQ ID NO: 9, SEQ ID NO: 10, SEQ ID NO: 11, SEQ ID NO: 12, SEQ ID NO: 13, SEQ ID NO: 14, SEQ ID NO: 15, SEQ ID NO: 16, SEQ ID NO: 17, SEQ ID NO: 18, SEQ ID NO: 19, SEQ ID NO: 20, SEQ ID NO: 21, SEQ ID NO: 22, SEQ ID NO: 23, SEQ ID NO: 24, SEQ ID NO: 25, SEQ ID NO: 26, SEQ ID NO: 27, SEQ ID NO: 28, SEQ ID NO: 29, SEQ ID NO: 30, SEQ ID NO: 31, SEQ ID NO: 32, SEQ ID NO: 33, SEQ ID NO: 34, SEQ ID NO: 35, SEQ ID NO: 36, SEQ ID NO: 37, SEQ ID NO: 38, SEQ ID NO: 1000, SEQ ID NO: 1001, SEQ ID NO: 1002, or a functional fragment thereof, or an amino acid sequence with at least 80%, 85%, 90%, 91%, 92%, 93%, 94%, 95%, 96%, 97%, 98%, 99%, or more sequence identity thereof, or differing by no more than 1, 2, 3, 4, 5, 6, 7, 8, 9, 10, 11, 12, 13, 14, 15, 20, 25, or 30 amino acids thereto.
57. The IL-2 agent of paragraph 56, wherein the human IL-2 variant comprises the amino acid sequence shown as SEQ ID NO: 4, SEQ ID NO: 5, or a functional fragment thereof, or an amino acid sequence with at least 80%, 85%, 90%, 91%, 92%, 93%, 94%, 95%, 96%, 97%, 98%, 99%, or more sequence identity thereof, or differing by no more than 1, 2, 3, 4, 5, 6, 7, 8, 9, 10, 11, 12, 13, 14, 15, 20, 25, or 30 amino acids thereto.
58. The IL-2 agent of any one of the preceding paragraphs, wherein the human IL-2 variant is fused to a non-IL-2 moiety by a linker, wherein the linker is a polypeptide linker, optionally wherein the polypeptide linker is a flexible linker, a rigid linker, or a cleavable linker.
59. The IL-2 agent of paragraph 58, wherein the polypeptide linker is a Gly-Ser linker (e.g., a (G₄S)ₙ linker, wherein n=1, 2, 3, 4, 5, 6 or more (SEQ ID NO: 1020)), a proline-rich extended linker (e.g., V1 GPc, V2, GPGc, V3 GcGcP, cellulase linker 4, cellulase linker 4), a rigid linker (e.g., A(EAAAK)ₙA, wherein n=2, 3, 4, 5, or more (SEQ ID NO: 1021); REPR_12), a non-GS linker (e.g., (GGGSA)ₙ, wherein n=1, 2, 3, 4, 5, or more (SEQ ID NO: 1022)), or an immunoglobulin hinge region or portion thereof.
60. The IL-2 agent of paragraph 58 or 59, wherein the polypeptide linker is a Gly-Ser linker comprising (G₄S)₁ (SEQ ID NO: 1023), (G₄S)₂ (SEQ ID NO: 1024), (G₄S)₃ (SEQ ID NO: 1025), (G₄S)₄ (SEQ ID NO: 48), (G₄S)₅ (SEQ ID NO: 1026), or (G₄S)₆ (SEQ ID NO: 1027).
61. The IL-2 agent of paragraph 60, wherein the polypeptide linker is a Gly-Ser linker comprising (G₄S)₄ (SEQ ID NO: 48).
62. The IL-2 agent of paragraph 58, wherein the polypeptide linker comprises an amino acid sequence chosen from SEQ ID NO: 48, SEQ ID NO: 49, SEQ ID NO: 50, SEQ ID NO: 51, SEQ ID NO: 52, SEQ ID NO: 53, SEQ ID NO: 54, or SEQ ID NO: 55.
63. The IL-2 agent of paragraph 62, wherein the polypeptide linker comprises the amino acid sequence of SEQ ID NO: 48.
64. The IL-2 agent of any one of paragraphs 58-63, wherein the non-IL-2 moiety is an immunoglobulin Fc region, or a fragment or portion thereof.
65. The IL-2 agent of paragraph 64, wherein the immunoglobulin Fc region comprises an IgG Fc region, an IgD Fc region, an IgA Fc region, an IgM Fc region, or an IgE Fc region, or fragment or portion thereof.
66. The IL-2 agent of paragraph 65, wherein the IgG Fc region comprises a wild type human IgG1 Fc region, a wild type IgG2 Fc region, or a wild type human IgG4 Fc region, or a fragment or portion thereof.
67. The IL-2 agent of paragraph 65, wherein the IgG Fc region comprises a mutant IgG1 (e.g., IgG1 m3 allotype) or mutant IgG4 Fc region, or a fragment or portion thereof.
68. The IL-2 agent of paragraph 67, comprising a mutant IgG4 Fc region, or a fragment or portion thereof, wherein the mutant IgG4 Fc region is human.
69. The IL-2 agent of paragraph 67 or 68, wherein the mutant IgG4 Fc region, or fragment or portion thereof, comprises an amino acid alteration (e.g., substitution) at Ser228, numbering according to EU numbering, optionally wherein the amino acid alteration (e.g., substitution) at Ser228 is S228P.
70. The IL-2 agent of any one of paragraphs 67-69, wherein the mutant IgG4 Fc region, or fragment or portion thereof, comprises an amino acid alteration (e.g., substitution) at Arg409, numbering according to EU numbering, optionally wherein the amino acid alteration (e.g., substitution) at Arg409 is R409K.
71. The IL-2 agent of any one of paragraphs 67-70, wherein the mutant IgG4 Fc region, or a fragment or portion thereof, comprises amino acid alterations (e.g., substitutions) at Thr307, Gln311, and Ala378, numbering according to EU numbering, optionally wherein the amino acid alterations (e.g., substitutions) are T307Q, Q311V, and A378V, respectively.
72. The IL-2 agent of paragraph 67 or 68, wherein the mutant IgG4 Fc region comprises an amino acid sequence chosen from SEQ ID NO: 44, SEQ ID NO: 45, SEQ ID NO: 46, or SEQ ID NO: 47.
73. The IL-2 agent of paragraph 67, comprising a mutant IgG1 Fc region, or a fragment or portion thereof, wherein the mutant IgG1 Fc region is human.
74. The IL-2 agent of paragraph 67 or 73, wherein the mutant IgG1 Fc region, or a fragment or portion thereof, comprises an amino acid alteration (e.g., substitution) at Asn297, numbering according to EU numbering, optionally wherein the amino acid alteration (e.g., substitution) at Asn297 is N297G.
75. The IL-2 agent of paragraph 67 or 73, wherein the mutant IgG1 Fc region, or a fragment or portion thereof, comprises amino acid alterations (e.g., substitutions) at Leu234, Leu235, and Pro329, numbering according to EU numbering, optionally wherein the amino acid alterations (e.g., substitutions are L234A, L235A, and P329G, respectively.
76. The IL-2 agent of paragraphs 67 or 73-75, wherein the mutant IgG1 Fc region, or a fragment or portion thereof, comprises amino acid alterations (e.g., substitutions) at Thr307, Gln311, and Ala378, numbering according to EU numbering, optionally wherein the amino acid alterations (e.g., substitutions) are T307Q, Q311V, and A378V, respectively.
77. The IL-2 agent of paragraph 67 or 73, wherein the mutant IgG1 Fc region comprises an amino acid sequence chosen from SEQ ID NO: 40, SEQ ID NO: 41, SEQ ID NO: 42, SEQ ID NO: 43, or SEQ ID: 1003.
78. The IL-2 agent of paragraph 67 or 73, wherein the mutant IgG1 Fc region comprises the amino acid sequence of SEQ ID NO: 1003 or a sequence with at least 95% sequence identity thereto.
79. The IL-2 agent of any one of paragraphs 58-77, wherein the non-IL-2 moiety inhibits or decreases the ability of the IL-2 agent to elicit Fc-receptor-mediated immune effector functions.
80. An interleukin-2 (IL-2) agent comprising an IL-2 variant comprising an amino acid sequence chosen from SEQ ID NO: 2, SEQ ID NO: 3, SEQ ID NO: 4, SEQ ID NO: 5, SEQ ID NO: 6, SEQ ID NO: 7, SEQ ID NO: 8, SEQ ID NO: 9, SEQ ID NO: 10, SEQ ID NO: 11, SEQ ID NO: 12, SEQ ID NO: 13, SEQ ID NO: 14, SEQ ID NO: 15, SEQ ID NO: 16, SEQ ID NO: 17, SEQ ID NO: 18, SEQ ID NO: 19, SEQ ID NO: 20, SEQ ID NO: 21, SEQ ID NO: 22, SEQ ID NO: 23, SEQ ID NO: 24, SEQ ID NO: 25, SEQ ID NO: 26, SEQ ID NO: 27, SEQ ID NO: 28, SEQ ID NO: 29, SEQ ID NO: 30, SEQ ID NO: 31, SEQ ID NO: 32, SEQ ID NO: 33, SEQ ID NO: 34, SEQ ID NO: 35, SEQ ID NO: 36, SEQ ID NO: 37, SEQ ID NO: 38, SEQ ID NO: 1000, SEQ ID NO: 1001, or SEQ ID NO: 1002, or a functional fragment thereof; wherein the IL-2 agent comprises a Gly-Ser linker, optionally wherein the Gly-Ser linker comprises (G₄S)₄ (SEQ ID NO: 48), and wherein the IL-2 variant is fused by the Gly-Ser linker to an IgG Fc region comprising an amino acid sequence chosen from SEQ ID NO: 39, SEQ ID NO: 40, SEQ ID NO: 41, SEQ ID NO: 42, SEQ ID NO: 43, SEQ ID NO: 44, SEQ ID NO: 45, SEQ ID NO: 46, SEQ ID NO: 47, or SEQ ID NO: 1003.
81. An IL-2 agent of paragraph 80, wherein the IL-2 agent comprises the IL-2 variant sequence comprising an amino acid sequence shown as SEQ ID NO: 4 or SEQ ID NO: 5.
82. An interleukin-2 (IL-2) agent comprising an amino acid sequence chosen from SEQ ID NO: 56, SEQ ID NO: 57, SEQ ID NO: 58, SEQ ID NO: 59, SEQ ID NO: 60, SEQ ID NO: 61, SEQ ID NO: 62, SEQ ID NO: 63, SEQ ID NO: 64, SEQ ID NO: 65, SEQ ID NO: 66, SEQ ID NO: 67, SEQ ID NO: 68, SEQ ID NO: 69, SEQ ID NO: 70, SEQ ID NO: 71, SEQ ID NO: 72, SEQ ID NO: 73, SEQ ID NO: 74, SEQ ID NO: 75, SEQ ID NO: 76, SEQ ID NO: 77, SEQ ID NO: 78, SEQ ID NO: 79, SEQ ID NO: 80, SEQ ID NO: 81, SEQ ID NO: 82, SEQ ID NO: 83, SEQ ID NO: 84, SEQ ID NO: 85, SEQ ID NO: 86, SEQ ID NO: 87, SEQ ID NO: 88, SEQ ID NO: 89, SEQ ID NO: 90, SEQ ID NO: 91, SEQ ID NO: 92, SEQ ID NO: 93, SEQ ID NO: 1004, SEQ ID NO: 1005, SEQ ID NO: 1006, SEQ ID NO: 1007, SEQ ID NO: 1008, or SEQ ID NO: 1009, or a functional fragment thereof.
83. An interleukin-2 (IL-2) agent comprising an amino acid sequence chosen from SEQ ID NO: 1004, SEQ ID NO: 1005, SEQ ID NO: 1006, SEQ ID NO: 1007, SEQ ID NO: 1008, or SEQ ID NO: 1009 or a functional fragment thereof
84. An interleukin-2 (IL-2) agent comprising an amino acid sequence chosen from SEQ ID NO: 94, SEQ ID NO: 95, SEQ ID NO: 96, SEQ ID NO: 97, SEQ ID NO: 98, SEQ ID NO: 99, SEQ ID NO: 100, SEQ ID NO: 101, SEQ ID NO: 102, SEQ ID NO: 103, SEQ ID NO: 104, SEQ ID NO: 105, SEQ ID NO: 106, SEQ ID NO: 107, SEQ ID NO: 108, SEQ ID NO: 109, SEQ ID NO: 110, SEQ ID NO: 111, SEQ ID NO: 112, SEQ ID NO: 113, SEQ ID NO: 114, SEQ ID NO: 115, SEQ ID NO: 116, SEQ ID NO: 117, SEQ ID NO: 118, SEQ ID NO: 119, SEQ ID NO: 120, SEQ ID NO: 121, SEQ ID NO: 122, SEQ ID NO: 123, SEQ ID NO: 124, SEQ ID NO: 125, SEQ ID NO: 126, SEQ ID NO: 127, SEQ ID NO: 128, SEQ ID NO: 129, SEQ ID NO: 130, or SEQ ID NO: 131, or a functional fragment thereof.
85. An interleukin-2 (IL-2) agent comprising an amino acid sequence chosen from SEQ ID NO: 132, SEQ ID NO: 133, SEQ ID NO: 134, SEQ ID NO: 135, SEQ ID NO: 136, SEQ ID NO: 137, SEQ ID NO: 138, SEQ ID NO: 139, SEQ ID NO: 140, SEQ ID NO: 141, SEQ ID NO: 142, SEQ ID NO: 143, SEQ ID NO: 144, SEQ ID NO: 145, SEQ ID NO: 146, SEQ ID NO: 147, SEQ ID NO: 148, SEQ ID NO: 149, SEQ ID NO: 150, SEQ ID NO: 151, SEQ ID NO: 152, SEQ ID NO: 153, SEQ ID NO: 154, SEQ ID NO: 155, SEQ ID NO: 156, SEQ ID NO: 157, SEQ ID NO: 158, SEQ ID NO: 159, SEQ ID NO: 160, SEQ ID NO: 161, SEQ ID NO: 162, SEQ ID NO: 163, SEQ ID NO: 164, SEQ ID NO: 165, SEQ ID NO: 166, SEQ ID NO: 167, SEQ ID NO: 168, or SEQ ID NO: 169, or a functional fragment thereof.
86. An interleukin-2 (IL-2) agent comprising an amino acid sequence chosen from SEQ ID NO: 170, SEQ ID NO: 171, SEQ ID NO: 172, SEQ ID NO: 173, SEQ ID NO: 174, SEQ ID NO: 175, SEQ ID NO: 176, SEQ ID NO: 177, SEQ ID NO: 178, SEQ ID NO: 179, SEQ ID NO: 180, SEQ ID NO: 181, SEQ ID NO: 182, SEQ ID NO: 183, SEQ ID NO: 184, SEQ ID NO: 185, SEQ ID NO: 186, SEQ ID NO: 187, SEQ ID NO: 188, SEQ ID NO: 189, SEQ ID NO: 190, SEQ ID NO: 191, SEQ ID NO: 192, SEQ ID NO: 193, SEQ ID NO: 194, SEQ ID NO: 195, SEQ ID NO: 196, SEQ ID NO: 197, SEQ ID NO: 198, SEQ ID NO: 199, SEQ ID NO: 200, SEQ ID NO: 201, SEQ ID NO: 202, SEQ ID NO: 203, SEQ ID NO: 204, SEQ ID NO: 205, SEQ ID NO: 206, or SEQ ID NO: 207, or a functional fragment thereof.
87. An interleukin-2 (IL-2) agent comprising an amino acid sequence chosen from SEQ ID NO: 208, SEQ ID NO: 209, SEQ ID NO: 210, SEQ ID NO: 211, SEQ ID NO: 212, SEQ ID NO: 213, SEQ ID NO: 214, SEQ ID NO: 215, SEQ ID NO: 216, SEQ ID NO: 217, SEQ ID NO: 218, SEQ ID NO: 219, SEQ ID NO: 220, SEQ ID NO: 221, SEQ ID NO: 222, SEQ ID NO: 223, SEQ ID NO: 224, SEQ ID NO: 225, SEQ ID NO: 226, SEQ ID NO: 227, SEQ ID NO: 228, SEQ ID NO: 229, SEQ ID NO: 230, SEQ ID NO: 231, SEQ ID NO: 232, SEQ ID NO: 233, SEQ ID NO: 234, SEQ ID NO: 235, SEQ ID NO: 236, SEQ ID NO: 237, SEQ ID NO: 238, SEQ ID NO: 239, SEQ ID NO: 240, SEQ ID NO: 241, SEQ ID NO: 242, SEQ ID NO: 243, SEQ ID NO: 244, or SEQ ID NO: 245, or a functional fragment thereof.
88. An interleukin-2 (IL-2) agent comprising an amino acid sequence chosen from SEQ ID NO: 246, SEQ ID NO: 247, SEQ ID NO: 248, SEQ ID NO: 249, SEQ ID NO: 250, SEQ ID NO: 251, SEQ ID NO: 252, SEQ ID NO: 253, SEQ ID NO: 254, SEQ ID NO: 255, SEQ ID NO: 256, SEQ ID NO: 257, SEQ ID NO: 258, SEQ ID NO: 259, SEQ ID NO: 260, SEQ ID NO: 261, SEQ ID NO: 262, SEQ ID NO: 263, SEQ ID NO: 264, SEQ ID NO: 265, SEQ ID NO: 266, SEQ ID NO: 267, SEQ ID NO: 268, SEQ ID NO: 269, SEQ ID NO: 270, SEQ ID NO: 271, SEQ ID NO: 272, SEQ ID NO: 273, SEQ ID NO: 274, SEQ ID NO: 275, SEQ ID NO: 276, SEQ ID NO: 277, SEQ ID NO: 278, SEQ ID NO: 279, SEQ ID NO: 280, SEQ ID NO: 281, SEQ ID NO: 282, or SEQ ID NO: 283, or a functional fragment thereof.
89. An interleukin-2 (IL-2) agent comprising an amino acid sequence chosen from SEQ ID NO: 284, SEQ ID NO: 285, SEQ ID NO: 286, SEQ ID NO: 287, SEQ ID NO: 288, SEQ ID NO: 289, SEQ ID NO: 290, SEQ ID NO: 291, SEQ ID NO: 292, SEQ ID NO: 293, SEQ ID NO: 294, SEQ ID NO: 295, SEQ ID NO: 296, SEQ ID NO: 297, SEQ ID NO: 298, SEQ ID NO: 299, SEQ ID NO: 300, SEQ ID NO: 301, SEQ ID NO: 302, SEQ ID NO: 303, SEQ ID NO: 304, SEQ ID NO: 305, SEQ ID NO: 306, SEQ ID NO: 307, SEQ ID NO: 308, SEQ ID NO: 309, SEQ ID NO: 310, SEQ ID NO: 311, SEQ ID NO: 312, SEQ ID NO: 313, SEQ ID NO: 314, SEQ ID NO: 315, SEQ ID NO: 316, SEQ ID NO: 317, SEQ ID NO: 318, SEQ ID NO: 319, SEQ ID NO: 320, or SEQ ID NO: 321, or a functional fragment thereof.
90. An interleukin-2 (IL-2) agent comprising an amino acid sequence chosen from SEQ ID NO: 322, SEQ ID NO: 323, SEQ ID NO: 324, SEQ ID NO: 325, SEQ ID NO: 326, SEQ ID NO: 327, SEQ ID NO: 328, SEQ ID NO: 329, SEQ ID NO: 330, SEQ ID NO: 331, SEQ ID NO: 332, SEQ ID NO: 333, SEQ ID NO: 334, SEQ ID NO: 335, SEQ ID NO: 336, SEQ ID NO: 337, SEQ ID NO: 338, SEQ ID NO: 339, SEQ ID NO: 340, SEQ ID NO: 341, SEQ ID NO: 342, SEQ ID NO: 343, SEQ ID NO: 344, SEQ ID NO: 345, SEQ ID NO: 346, SEQ ID NO: 347, SEQ ID NO: 348, SEQ ID NO: 349, SEQ ID NO: 350, SEQ ID NO: 351, SEQ ID NO: 352, SEQ ID NO: 353, SEQ ID NO: 354, SEQ ID NO: 355, SEQ ID NO: 356, SEQ ID NO: 357, SEQ ID NO: 358, or SEQ ID NO: 359, or a functional fragment thereof.
91. An interleukin-2 (IL-2) agent comprising the amino acid sequence of SEQ ID NO: 59, or a functional fragment thereof.
92. An interleukin-2 (IL-2) agent comprising the amino acid sequence of SEQ ID NO: 97, or a functional fragment thereof.
93. An interleukin-2 (IL-2) agent comprising the amino acid sequence of SEQ ID NO: 135, or a functional fragment thereof.
94. An interleukin-2 (IL-2) agent comprising the amino acid sequence of SEQ ID NO: 173, or a functional fragment thereof.
95. An interleukin-2 (IL-2) agent comprising the amino acid sequence of SEQ ID NO: 211, or a functional fragment thereof.
96. An interleukin-2 (IL-2) agent comprising the amino acid sequence of SEQ ID NO: 249, or a functional fragment thereof.
97. An interleukin-2 (IL-2) agent comprising the amino acid sequence of SEQ ID NO: 287, or a functional fragment thereof.
98. An interleukin-2 (IL-2) agent comprising the amino acid sequence of SEQ ID NO: 325, or a functional fragment thereof.
99. An interleukin-2 (IL-2) agent comprising the amino acid sequence of SEQ ID NO: 66, or a functional fragment thereof.
100. An interleukin-2 (IL-2) agent comprising the amino acid sequence of SEQ ID NO: 104, or a functional fragment thereof.
101. An interleukin-2 (IL-2) agent comprising the amino acid sequence of SEQ ID NO: 142, or a functional fragment thereof.
103. An interleukin-2 (IL-2) agent comprising the amino acid sequence of SEQ ID NO: 180, or a functional fragment thereof.
104. An interleukin-2 (IL-2) agent comprising the amino acid sequence of SEQ ID NO: 218, or a functional fragment thereof.
105. An interleukin-2 (IL-2) agent comprising the amino acid sequence of SEQ ID NO: 256, or a functional fragment thereof.
106. An interleukin-2 (IL-2) agent comprising the amino acid sequence of SEQ ID NO: 294, or a functional fragment thereof.
107. An interleukin-2 (IL-2) agent comprising the amino acid sequence of SEQ ID NO: 332, or a functional fragment thereof.
108. An interleukin-2 (IL-2) agent comprising the amino acid sequence of SEQ ID NO: 60, or a functional fragment thereof.
109. An interleukin-2 (IL-2) agent comprising the amino acid sequence of SEQ ID NO: 98, or a functional fragment thereof.
110. An interleukin-2 (IL-2) agent comprising the amino acid sequence of SEQ ID NO: 136, or a functional fragment thereof.
111. An interleukin-2 (IL-2) agent comprising the amino acid sequence of SEQ ID NO: 174, or a functional fragment thereof.
112. An interleukin-2 (IL-2) agent comprising the amino acid sequence of SEQ ID NO: 212, or a functional fragment thereof.
113. An interleukin-2 (IL-2) agent comprising the amino acid sequence of SEQ ID NO: 250, or a functional fragment thereof.
114. An interleukin-2 (IL-2) agent comprising the amino acid sequence of SEQ ID NO: 288, or a functional fragment thereof.
115. An interleukin-2 (IL-2) agent comprising the amino acid sequence of SEQ ID NO: 326, or a functional fragment thereof.
116. An interleukin-2 (IL-2) agent comprising the amino acid sequence of SEQ ID NO: 69, or a functional fragment thereof.
117. An interleukin-2 (IL-2) agent comprising the amino acid sequence of SEQ ID NO: 107, or a functional fragment thereof.
118. An interleukin-2 (IL-2) agent comprising the amino acid sequence of SEQ ID NO: 145, or a functional fragment thereof.
119. An interleukin-2 (IL-2) agent comprising the amino acid sequence of SEQ ID NO: 183, or a functional fragment thereof.
120. An interleukin-2 (IL-2) agent comprising the amino acid sequence of SEQ ID NO: 221, or a functional fragment thereof.
121. An interleukin-2 (IL-2) agent comprising the amino acid sequence of SEQ ID NO: 259, or a functional fragment thereof.
122. An interleukin-2 (IL-2) agent comprising the amino acid sequence of SEQ ID NO: 297, or a functional fragment thereof.
123. An interleukin-2 (IL-2) agent comprising the amino acid sequence of SEQ ID NO: 335, or a functional fragment thereof.
124. An interleukin-2 (IL-2) agent comprising the amino acid sequence of SEQ ID NO: 1004, or a functional fragment thereof.
125. An interleukin-2 (IL-2) agent comprising the amino acid sequence of SEQ ID NO: 1005, or a functional fragment thereof.
126. An interleukin-2 (IL-2) agent comprising the amino acid sequence of SEQ ID NO: 1006, or a functional fragment thereof.
127. An interleukin-2 (IL-2) agent comprising the amino acid sequence of SEQ ID NO: 1007, or a functional fragment thereof.
128. An interleukin-2 (IL-2) agent comprising the amino acid sequence of SEQ ID NO: 1008, or a functional fragment thereof.
129. An interleukin-2 (IL-2) agent comprising the amino acid sequence of SEQ ID NO: 1009, or a functional fragment thereof.
130. The IL-2 agent of any one of the preceding paragraphs, wherein the amino acid alteration(s) (e.g., substitution(s)) provides the IL-2 agent with at least one or more (e.g., 2, 3, 4, 5, 6, 7, 8, or all) of the following properties relative to a reference IL-2 agent that does not comprise the amino acid alteration(s) (e.g., substitution(s)):

[0787] (i) enhanced or increased expression of the IL-2 agent;

[0788] (ii) inhibited or decreased aggregation of the IL-2 agent;

[0789] (iii) enhanced or increased stability of the IL-2 agent;

[0790] (iv) enhanced or increased half-life of the IL-2 agent;

[0791] (v) inhibited or decreased turnover and/or clearance of the IL-2 agent;

[0792] (vi) inhibited or decreased (e.g., moderately inhibited or decreased) or substantially unchanged binding of the IL-2 agent to human CD25;

[0793] (vii) inhibited or decreased affinity of the IL-2 agent for human CD122;

[0794] (viii) inhibited or decreased affinity of the IL-2 agent for human CD132; or

[0795] (ix) inhibited or decreased affinity of the IL-2 agent for the dimeric IL-2 receptor composed of human CD122 and human CD132;

[0796] (x) selective binding to regulatory T cells (e.g., Foxp3+ T cells);

[0797] (xi) selective activation of the IL-2 signaling pathway in Tregs; and/or

[0798] (xii) enhanced or increased, or reduced or decreased, ability to induce or promote Treg expansion, activity, survival and/or proliferation.

131. The IL-2 agent of paragraph 130, wherein the reference IL-2 agent comprises the amino acid sequence of SEQ ID NO: 1031, SEQ ID NO: 1, or SEQ ID NO: 2, or a functional fragment thereof.
132. An interleukin-2 (IL-2) agent comprising: a human IL-2 variant comprising one or more amino acid alteration(s) (e.g., substitution(s)) chosen from H16D, H16N, H16L, I28T, K35E, R38Q, R38N, R38E, F42K, F42Q, V69A, Q74P, D84V, S87R, N88L, N88S, I92S, C125S; a polypeptide linker; and a non-IL-2 moiety; wherein the amino acid alteration(s) (e.g., substitution(s)) provide(s) the IL-2 agent with at least one or more of the following properties relative to a reference IL-2 agent that does not comprise the amino acid alteration(s) (e.g., substitution(s)):

[0799] (i) enhanced or increased expression of the IL-2 agent;

[0800] (ii) inhibited or decreased aggregation of the IL-2 agent;

[0801] (iii) enhanced or increased stability of the IL-2 agent;

[0802] (iv) enhanced or increased half-life of the IL-2 agent;

[0803] (v) inhibited or decreased turnover and/or clearance of the IL-2 agent;

[0804] (vi) inhibited or decreased (e.g., moderately inhibited or decreased) or substantially unchanged binding of the IL-2 agent to human CD25;

[0805] (vii) inhibited or decreased affinity of the IL-2 agent for human CD122;

[0806] (viii) inhibited or decreased affinity of the IL-2 agent for human CD132;

[0807] (ix) inhibited or decreased affinity of the IL-2 agent for the dimeric IL-2 receptor composed of human CD122 and human CD132;

[0808] (x) selective binding to regulatory T cells (e.g., Foxp3+ T cells);

[0809] (xi) selective activation of the IL-2 signaling pathway in Tregs; and/or

[0810] (xii) enhanced or increased, or reduced or decreased, ability to induce or promote Treg expansion, activity, survival, and/or proliferation.

133. The IL-2 agent of paragraph 132, wherein the human IL-2 variant comprises the amino acid alteration(s) (e.g., substitution(s)):

[0811] (i) C125S;

[0812] (ii) V69A, Q74P, and C125S;

[0813] (iii) H16D, V69A, Q74P, and C125S;

[0814] (iv) H16N, V69A, Q74P, and C125S;

[0815] (v) H16L, V69A, Q74P, and C125S;

[0816] (vi) I28T, V69A, Q74P, and C125S;

[0817] (vii) V69A, Q74P, D84V, and C125S;

[0818] (viii) V69A, Q74P, S87R, and C125S;

[0819] (ix) V69A, Q74P, N88L, and C125S;

[0820] (x) V69A, Q74P, N88S, and C125S;

[0821] (xi) V69A, Q74P, I92S, and C125S;

[0822] (xii) K35E, V69A, Q74P, and C125S;

[0823] (xiii) K35E, H16N, V69A, Q74P, and C125S;

[0824] (xiv) K35E, H16L, V69A, Q74P, and C125S;

[0825] (xv) K35E, D84V, V69A, Q74P, and C125S;

[0826] (xvi) K35E, I92S, V69A, Q74P, and C125S;

[0827] (xvii) R38Q, V69A, Q74P, and C125S;

[0828] (xviii) R38Q, H16N, V69A, Q74P, and C125S;

[0829] (xix) R38Q, H16L, V69A, Q74P, and C125S;

[0830] (xx) R38Q, D84V, V69A, Q74P, and C125S;

[0831] (xxi) R38Q, I92S, Q74P, and C125S;

[0832] (xxii) R38N, V69A, Q74P, and C125S;

[0833] (xxiii) R38N, H16N, V69A, Q74P, and C125S;

[0834] (xxiv) R38N, H16L, V69A, Q74P, and C125S;

[0835] (xxv) R38N, D84V, V69A, Q74P, and C125S;

[0836] (xxvi) R38N, I92S, Q74P, and C125S;

[0837] (xxvii) R38E, V69A, Q74P, and C125S;

[0838] (xxviii) F42K, V69A, Q74P, and C125S;

[0839] (xxix) F42Q, V69A, Q74P, and C125S;

[0840] (xxx) F42A, Y45A, L72G, N88D, V69A, Q74P, and C125S;

[0841] (xxxi) R38N, S87R, V69A, Q74P, and C125S;

[0842] (xxxii) R38E, H16N, V69A, Q74P, and C125S;

[0843] (xxxiii) R38E, D84V, V69A, Q74P, and C125S;

[0844] (xxxiv) R38E, S87R, V69A, Q74P, and C125S;

[0845] (xxxv) R38E, I92S, V69A, Q74P, and C125S;

[0846] (xxxvi) F42Q, H16N, V69A, Q74P, and C125S;

[0847] (xxxvii) F42Q, I92S, V69A, Q74P, and C125S;

[0848] (xxxviii) K35E, R38N, H16N, V69A, Q74P, and C125S;

[0849] (xxxix) T3A, H16N, V69A, Q74P, and C125S;

[0850] (xl) T3A, H16L, V69A, Q74P, and C125S; or

[0851] (xli) T3A, V69A, Q74P, I92S, and C125S.

134. The IL-2 agent of paragraph 133, wherein the human IL-2 variant comprises the amino acid alteration(s) (e.g., substitution(s)): (i) H16N, V69A, Q74P and C125S, or (ii) H16L, V69A, Q74P and C125S.
135. An interleukin-2 (IL-2) agent comprising a human IL-2 variant comprising an amino acid sequence chosen from SEQ ID NO: 2, SEQ ID NO: 3, SEQ ID NO: 4, SEQ ID NO: 5, SEQ ID NO: 6, SEQ ID NO: 7, SEQ ID NO: 8, SEQ ID NO: 9, SEQ ID NO: 10, SEQ ID NO: 11, SEQ ID NO: 12, SEQ ID NO: 13, SEQ ID NO: 14, SEQ ID NO: 15, SEQ ID NO: 16, SEQ ID NO: 17, SEQ ID NO: 18, SEQ ID NO: 19, SEQ ID NO: 20, SEQ ID NO: 21, SEQ ID NO: 22, SEQ ID NO: 23, SEQ ID NO: 24, SEQ ID NO: 25, SEQ ID NO: 26, SEQ ID NO: 27, SEQ ID NO: 28, SEQ ID NO: 29, SEQ ID NO: 30, SEQ ID NO: 31, SEQ ID NO: 32, SEQ ID NO: 33, SEQ ID NO: 34, SEQ ID NO: 35, SEQ ID NO: 36, SEQ ID NO: 37, SEQ ID NO: 38, SEQ ID NO: 1000, SEQ ID NO: 1001, or SEQ ID NO: 1002, or a functional fragment thereof or an amino acid sequence with at least 90% sequence identity thereof; a polypeptide linker; and a non-IL-2 moiety; wherein the IL-2 agent exhibits at least one or more of the following properties relative to a reference IL-2 agent that does not comprise the human IL-2 polypeptide variant:

[0852] (i) enhanced or increased expression of the IL-2 agent;

[0853] (ii) inhibited or decreased aggregation of the IL-2 agent;

[0854] (iii) enhanced or increased stability of the IL-2 agent;

[0855] (iv) enhanced or increased half-life of the IL-2 agent;

[0856] (v) inhibited or decreased turnover and/or clearance of the IL-2 agent;

[0857] (vi) inhibited or decreased (e.g., moderately inhibited or decreased) or substantially unchanged binding of the IL-2 agent to human CD25;

[0858] (vii) inhibited or decreased affinity of the IL-2 agent for human CD122;

[0859] (viii) inhibited or decreased affinity of the IL-2 agent for human CD132;

[0860] (ix) inhibited or decreased affinity of the IL-2 agent for dimeric IL-2 receptor composed of human CD122 and human CD132;

[0861] (x) selective binding to regulatory T cells (e.g., Foxp3+ T cells); or

[0862] (xi) selective activation of the IL-2 signaling pathway in Tregs; or

[0863] (xii) enhanced or increased, or reduced or decreased, ability to induce or promote Treg expansion, activity and/or proliferation.

136. The IL-2 agent of paragraph 135, wherein the human IL-2 variant comprises the amino acid sequence shown as SEQ ID NO: 4 or SEQ ID NO: 5.
137. The IL-2 agent of any one of paragraphs 132-136, wherein the human IL-2 variant is fused to a non-IL-2 moiety by a linker, wherein the linker is a polypeptide linker, optionally wherein the polypeptide linker is a flexible linker, a rigid linker, or a cleavable linker.
138. The IL-2 agent of paragraph 137, wherein the polypeptide linker is a Gly-Ser linker (e.g., a (G4S)n linker, wherein n=1, 2, 3, 4, 5, 6 or more (SEQ ID NO: 1020)), a proline-rich extended linker (e.g., V1 GPc, V2, GPGc, V3 GcGcP, cellulase linker 4, cellulase linker 4), a rigid linker (e.g., A(EAAAK)nA, wherein n=2, 3, 4, 5, or more (SEQ ID NO: 1021); REPR_12), a non-GS linker (e.g., (GGGSA)n, wherein n=1, 2, 3, 4, 5, or more (SEQ ID NO: 1022)), or an immunoglobulin hinge region or portion thereof.
139. The IL-2 agent of paragraph 137 or 138, wherein the polypeptide linker is a Gly-Ser linker comprising (G₄S)₁ (SEQ ID NO: 1023), (G₄S)₂ (SEQ ID NO: 1024), (G₄S)₃ (SEQ ID NO: 1025), (G₄S)₄ (SEQ ID NO: 48), (G₄S)₅ (SEQ ID NO: 1026), or (G₄S)₆ (SEQ ID NO: 1027).
140. The IL-2 agent of paragraph 130, wherein the polypeptide linker is a Gly-Ser linker comprising (G₄S)₄ (SEQ ID NO: 48).
141. The IL-2 agent of paragraph 137, wherein the polypeptide linker comprises an amino acid sequence chosen from SEQ ID NO: 48, SEQ ID NO: 49, SEQ ID NO: 50, SEQ ID NO: 51, SEQ ID NO: 52, SEQ ID NO: 53, SEQ ID NO: 54, or SEQ ID NO: 55.
142. The IL-2 agent of paragraph 141, wherein the polypeptide linker comprises the amino acid sequence of SEQ ID NO: 48.
143. The IL-2 agent of any one of paragraphs 132-142, wherein the non-IL-2 moiety is an immunoglobulin Fc region, or a fragment or portion thereof.
144. The IL-2 agent of paragraph 143, wherein the immunoglobulin Fc region comprises an IgG Fc region, an IgD Fc region, an IgA Fc region, an IgM Fc region, or an IgE Fc region, or fragment or portion thereof.
145. The IL-2 agent of paragraph 144, wherein the IgG Fc region comprises a wild type human IgG1 Fc region, a wild type IgG2 Fc region, or a wild type human IgG4 Fc region, or a fragment or portion thereof.
146. The IL-2 agent of paragraph 144, wherein the IgG Fc region comprises a mutant IgG1 (e.g., IgG1 m3 allotype) or mutant IgG4 Fc region, or a fragment or portion thereof.
147. The IL-2 agent of paragraph 146, comprising a mutant IgG4 Fc region, or a fragment or portion thereof, wherein the mutant IgG4 Fc region is human.
148. The IL-2 agent of paragraph 146 or 147, wherein the mutant IgG4 Fc region, or fragment or portion thereof, comprises an amino acid alteration (e.g., substitution) at Ser228, numbering according to EU numbering, optionally wherein the amino acid alteration (e.g., substitution) at Ser228 is S228P.
149. The IL-2 agent of any one of paragraphs 146-148, wherein the mutant IgG4 Fc region, or fragment or portion thereof, comprises an amino acid alteration (e.g., substitution) at Arg409, numbering according to EU numbering, optionally wherein the amino acid alteration (e.g., substitution) at Arg409 is R409K.
150. The IL-2 agent of any one of paragraphs 146-149, wherein the mutant IgG4 Fc region, or a fragment or portion thereof, comprises amino acid alterations (e.g., substitutions) at Thr307, Gln311, and Ala378, numbering according to EU numbering, optionally wherein the amino acid alterations (e.g., substitutions) are T307Q, Q311V, and A378V, respectively.
151. The IL-2 agent of paragraph 146 or 147, wherein the mutant IgG4 Fc region comprises an amino acid sequence chosen from SEQ ID NO: 44, SEQ ID NO: 45, SEQ ID NO: 46, or SEQ ID NO: 47.
152. The IL-2 agent of paragraph 146, comprising a mutant IgG1 Fc region, or a fragment or portion thereof, wherein the mutant IgG1 Fc region is human.
153. The IL-2 agent of paragraph 146 or 152, wherein the mutant IgG1 Fc region, or a fragment or portion thereof, comprises an amino acid alteration (e.g., substitution) at Asn297, numbering according to EU numbering, optionally wherein the amino acid alteration (e.g., substitution) at Asn297 is N297G.
154. The IL-2 agent of paragraph 146 or 152, wherein the mutant IgG1 Fc region, or a fragment or portion thereof, comprises amino acid alterations (e.g., substitutions) at Leu234, Leu235, and Pro329, numbering according to EU numbering, optionally wherein the amino acid alterations (e.g., substitutions are L234A, L235A, and P329G, respectively.
155. The IL-2 agent of any one of paragraphs 146 or 152-154, wherein the mutant IgG1 Fc region, or a fragment or portion thereof, comprises amino acid alterations (e.g., substitutions) at Thr307, Gln311, and Ala378, numbering according to EU numbering, optionally wherein the amino acid alterations (e.g., substitutions) are T307Q, Q311V, and A378V, respectively.
156. The IL-2 agent of paragraph 146 or 152, wherein the mutant IgG1 Fc region comprises an amino acid sequence chosen from SEQ ID NO: 40, SEQ ID NO: 41, SEQ ID NO: 42, SEQ ID NO: 43, or SEQ ID NO: 1003.
157. The IL-2 agent of any one of paragraphs 132-156, wherein the non-IL-2 moiety inhibits or decreases the ability of the IL-2 agent to elicit Fc-receptor-mediated immune effector functions.
158. The IL-2 agent of any one of paragraphs 132-157, wherein the reference IL-2 agent comprises the amino acid sequence of SEQ ID NO: 1031, SEQ ID NO: 1, or SEQ ID NO: 2.
159. The IL-2 agent of any one of the preceding paragraphs, which forms a dimer (e.g., a homodimer or heterodimer).
160. The IL-2 agent of any one of the preceding paragraphs, comprising an IL-2 agent/anti-IL-2 antibody complex.
161. The IL-2 agent of any one of the preceding paragraphs, comprising a conjugate.
162. A pharmaceutical composition comprising the IL-2 agent of any one of the preceding paragraphs, and a pharmaceutically acceptable carrier.
163. A nucleic acid encoding the IL-2 agent of any one of the preceding paragraphs.
164. A vector (e.g., expression vector) comprising the nucleic acid of paragraph 163.
165. A cell comprising the nucleic acid of paragraph 135 or the vector of paragraph 164.
166. A method of producing an IL-2 agent, comprising culturing (e.g., maintaining) the cell of paragraph 156 under conditions permitting expression of the IL-2 agent.
167. The method of paragraph 157, further comprising obtaining the IL-2 agent.
168. A method of enhancing regulatory T cell (Treg) expansion, activity, survival, and/or proliferation, comprising contacting a Treg cell or a population of Treg cells (e.g., in vitro, ex vivo, or in vivo) or administering to a subject in need thereof an effective amount of the IL-2 agent of any one of paragraphs 1-152, or the pharmaceutical composition of paragraph 153.
169. A method of selectively activating the IL-2 signaling pathway in regulatory T cells (Tregs), comprising contacting a Treg cell or a population of Treg cells (e.g., in vitro, ex vivo, or in vivo) or administering to a subject in need thereof an effective amount of the IL-2 agent of any one of paragraphs 1-161, or the pharmaceutical composition of paragraph 162.
170. A method of inducing immune tolerance in a subject in need thereof, comprising administering an effective amount of the IL-2 agent of any one of paragraphs 1-161, or the pharmaceutical composition of paragraph 162.
171. A method of treating a disorder (e.g., an autoimmune disease, a cancer) comprising administering to a subject in need thereof an effective amount of the IL-2 agent of any one of paragraphs 1-161, or the pharmaceutical composition of paragraph 162.
172. A composition for use in a method for the treatment of a disorder (e.g., an autoimmune disease or a cancer), the method comprising administering to a subject in need thereof the IL-2 agent of any one of paragraph 1-161, or the pharmaceutical composition of paragraph 162.
173. A kit comprising the IL-2 agent of any one of paragraph 1-161, or the pharmaceutical composition of paragraph 162, and instructions for use.
174. A container comprising the IL-2 agent of any one of paragraph 1-161, or the pharmaceutical composition of paragraph 162.
175. A method of treating a disorder (e.g., an autoimmune disease, a cancer) comprising administering to a subject in need thereof an effective amount of the nucleic acid of paragraph 163.
176. A composition for use in a method for the treatment of a disorder (e.g., an autoimmune disease or a cancer), the method comprising administering to a subject in need thereof the nucleic acid of paragraph 163.

[0864] The present disclosure further includes any of the following numbered embodiments:

1. An interleukin-2 (IL-2) variant, comprising:

[0865] (i) the amino acid substitution H16L or H16N, and/or the amino acid substitution I92S, and

[0866] (ii) the amino acid substitutions V69A, Q74P, and C125S,

[0867] corresponding to wild-type human IL-2 (e.g., SEQ ID NO: 1031).

2. The IL-2 variant of embodiment 1, further comprising the amino acid substitution T3A.
3. The IL-2 variant of embodiment 1 or 2, comprising the amino acid sequence of any of SEQ ID NOs: 4, 5, 11, 1000, 1001, or 1002, an amino acid sequence that is at least 95% identical thereto or differs by no more than 1, 2, 3, 4, or 5 amino acids therefrom, or a functional fragment thereof.
4. The IL-2 variant of any of embodiments 1-3, which selectively stimulates regulatory T cells (Tregs).
5. An IL-2 fusion protein comprising the IL-2 variant of any of embodiments 1-4.
6. The IL-2 fusion protein of embodiment 5, further comprising an Fc region.
7. The IL-2 fusion protein of embodiment 6, wherein the Fc region comprises an Fc region of IgG1 allotype m3 comprising an N297G substitution according to EU numbering.
8. The IL-2 fusion protein of embodiment 6 or 7, wherein the Fc region comprises the amino acid sequence of SEQ ID NO: 1003, or an amino acid sequence that is at least 95% identical thereto or differs by no more than 1, 2, 3, 4, 5, 6, 7, 8, 9, or 10 amino acids therefrom, or a functional fragment thereof.
9. The IL-2 fusion protein of any of embodiments 6-8, wherein the Fc region is fused to the C-terminus of the IL-2 variant.
10. The IL-2 fusion protein of any of embodiments 6-9, further comprising a linker.
11. The IL-2 fusion protein of embodiment 10, wherein the linker comprises (G₄S)₄ (SEQ ID NO: 48).
12. The IL-2 fusion protein of any of embodiments 6-11, comprising an amino acid sequence of any of SEQ ID NOs: 1004, 1005, 1006, 1007, 1008, or 1009, an amino acid sequence that is at least 95% identical thereto or differs by no more than 1, 2, 3, 4, 5, 6, 7, 8, 9, or 10 amino acids therefrom, or a functional fragment thereof.
13. The IL-2 fusion protein of any of embodiments 6-12, which forms a dimer.
14. An IL-2 complex comprising the IL-2 variant of any of embodiments 1˜4 and an anti-IL-2 antibody molecule.
15. An IL-2 conjugate comprising the IL-2 variant of any of embodiments 1˜4 and a non-IL-2 moiety.
16. A pharmaceutical composition comprising the IL-2 variant of any of embodiments 1˜4 and a pharmaceutically acceptable carrier.
17. A pharmaceutical composition comprising the IL-2 fusion protein of any of embodiments 5-13 and a pharmaceutically acceptable carrier.
18. A pharmaceutical composition comprising the IL-2 complex of embodiment 14 and a pharmaceutically acceptable carrier.
19. A pharmaceutical composition comprising the IL-2 conjugate of embodiment 15 and a pharmaceutically acceptable carrier.
20. A nucleic acid encoding the IL-2 variant of any of embodiments 1-4.
21. A nucleic acid encoding the IL-2 fusion protein any of embodiments 5-13.
22. A nucleic acid encoding the IL-2 complex of embodiment 14.
23. A nucleic acid encoding the IL-2 conjugate of embodiment 15.
24. A vector comprising the nucleic acid of embodiment 20.
25. A vector comprising the nucleic acid of embodiment 21.
26. A vector comprising the nucleic acid of embodiment 22.
27. A vector comprising the nucleic acid of embodiment 23.
28. A cell comprising the nucleic acid of embodiment 20.
29. A cell comprising the nucleic acid of embodiment 21.
30. A cell comprising the nucleic acid of embodiment 22.
31. A cell comprising the nucleic acid of embodiment 23.
32. A method of producing an IL-2 variant, comprising culturing the cell of embodiment 28 under conditions that allow expression of the IL-2 variant.
33. A method of producing an IL-2 fusion protein, comprising culturing the cell of embodiment 29 under conditions that allow expression of the IL-2 fusion protein.
34. A method of producing an IL-2 complex, comprising culturing the cell of embodiment 30 under conditions that allow expression of the IL-2 complex.
35. A method of producing an IL-2 conjugate, comprising culturing the cell of embodiment 31 under conditions that allow expression of the IL-2 conjugate.
36. A method of enhancing regulatory T cell (Treg) expansion, activity, survival, and/or proliferation, comprising contacting a Treg cell or a population of Treg cells in vitro, ex vivo, or in vivo, or administering to a subject in need thereof an effective amount of the IL-2 variant of any of embodiments 1-4.
37. A method of enhancing regulatory T cell (Treg) expansion, activity, survival, and/or proliferation, comprising contacting a Treg cell or a population of Treg cells in vitro, ex vivo, or in vivo, or administering to a subject in need thereof an effective amount of the IL-2 fusion protein of any of embodiments 5-13.
38. A method of enhancing regulatory T cell (Treg) expansion, activity, survival, and/or proliferation, comprising contacting a Treg cell or a population of Treg cells in vitro, ex vivo, or in vivo, or administering to a subject in need thereof an effective amount of the IL-2 complex of embodiment 14.
39. A method of enhancing regulatory T cell (Treg) expansion, activity, survival, and/or proliferation, comprising contacting a Treg cell or a population of Treg cells in vitro, ex vivo, or in vivo, or administering to a subject in need thereof an effective amount of the IL-2 conjugate of embodiment 15.
40. A method of selectively activating the IL-2 signaling pathway in regulatory T cells (Tregs), comprising contacting a Treg cell or a population of Treg cells in vitro, ex vivo, or in vivo, or administering to a subject in need thereof an effective amount of the IL-2 variant of any of embodiments 1-4.
41. A method of selectively activating the IL-2 signaling pathway in regulatory T cells (Tregs), comprising contacting a Treg cell or a population of Treg cells in vitro, ex vivo, or in vivo, or administering to a subject in need thereof an effective amount of the IL-2 fusion protein of any of embodiments 5-13.
42. A method of selectively activating the IL-2 signaling pathway in regulatory T cells (Tregs), comprising contacting a Treg cell or a population of Treg cells in vitro, ex vivo, or in vivo, or administering to a subject in need thereof an effective amount of the IL-2 complex of embodiment 14.
43. A method of selectively activating the IL-2 signaling pathway in regulatory T cells (Tregs), comprising contacting a Treg cell or a population of Treg cells in vitro, ex vivo, or in vivo, or administering to a subject in need thereof an effective amount of the IL-2 conjugate of embodiment 15.
44. A method of inducing immune tolerance, comprising administering to a subject in need thereof an effective amount of the IL-2 variant of any of embodiments 1-4.
45. A method of inducing immune tolerance, comprising administering to a subject in need thereof an effective amount of the IL-2 fusion protein of embodiment 5-13.
46. A method of inducing immune tolerance, comprising administering to a subject in need thereof an effective amount of the IL-2 complex of embodiment 14.
47. A method of inducing immune tolerance, comprising administering to a subject in need thereof an effective amount of the IL-2 conjugate of embodiment 15.
48. A method of treating an autoimmune disease, comprising administering to a subject in need thereof an effective amount of the IL-2 variant of any of embodiments 1-4.
49. A method of treating an autoimmune disease, comprising administering to a subject in need thereof an effective amount of the IL-2 fusion protein of any of embodiments 5-13.
50. A method of treating an autoimmune disease, comprising administering to a subject in need thereof an effective amount of the IL-2 complex of embodiment 14.
51. A method of treating an autoimmune disease, comprising administering to a subject in need thereof an effective amount of the IL-2 conjugate of embodiment 15.
52. A method of treating lupus nephritis, comprising administering to a subject in need thereof an effective amount of the IL-2 variant of any of embodiments 1-4.
53. A method of treating lupus nephritis, comprising administering to a subject in need thereof an effective amount of the IL-2 fusion protein of any of embodiments 5-13.
54. A method of treating lupus nephritis, comprising administering to a subject in need thereof an effective amount of the IL-2 complex of embodiment 14.
55. A method of treating lupus nephritis, comprising administering to a subject in need thereof an effective amount of the IL-2 conjugate of embodiment 15.
56. A method of treating autoimmune hepatitis, comprising administering to a subject in need thereof an effective amount of the IL-2 variant of any of embodiments 1-4.
57. A method of treating autoimmune hepatitis, comprising administering to a subject in need thereof an effective amount of the IL-2 fusion protein of any of embodiments 5-13.
58. A method of treating autoimmune hepatitis, comprising administering to a subject in need thereof an effective amount of the IL-2 complex of embodiment 14.
59. A method of treating autoimmune hepatitis, comprising administering to a subject in need thereof an effective amount of the IL-2 conjugate of embodiment 15.
60. A method of treating nephrotic syndrome, comprising administering to a subject in need thereof an effective amount of the IL-2 variant of any of embodiments 1-4.
61. A method of treating nephrotic syndrome, comprising administering to a subject in need thereof an effective amount of the IL-2 fusion protein of any of embodiments 5-13.
62. A method of treating nephrotic syndrome, comprising administering to a subject in need thereof an effective amount of the IL-2 complex of embodiment 14.
63. A method of treating nephrotic syndrome, comprising administering to a subject in need thereof an effective amount of the IL-2 conjugate of embodiment 15.
64. A kit comprising the IL-2 variant of any of embodiments 1˜4 and instructions for use.
65. A kit comprising the IL-2 fusion protein of any of embodiments 5-13 and instructions for use.
66. A kit comprising the IL-2 complex of embodiment 14 and instructions for use.
67. A kit comprising the IL-2 conjugate of embodiment 15 and instructions for use.
68. The IL-2 variant of any of embodiments 1˜4 for use in a method of inducing immune tolerance in a subject.
69. The IL-2 fusion protein of any of embodiments 5-13 for use in a method of inducing immune tolerance in a subject.
70. The IL-2 complex of embodiment 14 for use in a method of inducing immune tolerance in a subject.
71. The IL-2 conjugate of embodiment 15 for use in a method of inducing immune tolerance in a subject.
72. The IL-2 variant of any of embodiments 1˜4 for use in a method of treating an autoimmune disease in a subject.
73. The IL-2 fusion protein of any of embodiments 5-13 for use in a method of an autoimmune disease in a subject.
74. The IL-2 complex of embodiment 14 for use in a method of an autoimmune disease in a subject.
75. The IL-2 conjugate of embodiment 15 for use in a method of an autoimmune disease in a subject.
76. The IL-2 variant of any of embodiments 1˜4 for use in a method of treating lupus nephritis in a subject.
77. The IL-2 fusion protein of any of embodiments 5-13 for use in a method of treating lupus nephritis in a subject.
78. The IL-2 complex of embodiment 14 for use in a method of treating lupus nephritis in a subject.
79. The IL-2 conjugate of embodiment 15 for use in a method of treating lupus nephritis in a subject.
80. The IL-2 variant of any of embodiments 1˜4 for use in a method of treating autoimmune hepatitis in a subject.
81. The IL-2 fusion protein of any of embodiments 5-13 for use in a method of treating autoimmune hepatitis in a subject.
82. The IL-2 complex of embodiment 14 for use in a method of treating autoimmune hepatitis in a subject.
83. The IL-2 conjugate of embodiment 15 for use in a method of treating autoimmune hepatitis in a subject.
84. The IL-2 variant of any of embodiments 1˜4 for use in a method of treating nephrotic syndrome in a subject.
85. The IL-2 fusion protein of any of embodiments 5-13 for use in a method of treating nephrotic syndrome in a subject.
86. The IL-2 complex of embodiment 14 for use in a method of treating nephrotic syndrome in a subject.
87. The IL-2 conjugate of embodiment 15 for use in a method of treating nephrotic syndrome in a subject.

[0868] Other aspects and embodiments are also disclosed in U.S. Patent Publication No. US20210024601A1, filed Jul. 24, 2020 and International Publication No. WO 2021/021606, the contents of which are incorporated by reference in their entirety.

### EXAMPLES

### Example 1: Identification of Mutations that Prevent Aggregation of IL-2

[0869] A library of open reading frames (ORFs) encoding human IL-2 muteins was generated by site-saturation mutagenesis (a mutagenesis technique wherein the resulting library comprises a collection of ORFs each with single point mutations such that every amino acid is represented at every position within the ORF). To improve stability and prevent incorrect disulfide pairing, all IL-2 molecules discussed in the Examples contain the mutation C125S, as shown in FIG. 1B.

[0870] PCR amplicons comprising the library of ORFs encoding the IL-2 muteins were subsequently cloned into a yeast expression vector, allowing for fusion of each mutagenized human IL-2 mutein to an HA-tag and Myc-tag and to a yeast Aga2p polypeptide. The resulting yeast expression vector was used to transform yeast cells, as described in Boder and Wittrup (1997) Nat Biotechnol 15(6):553-557. Yeast cells clonally expressing the IL-2 mutein library were sorted once using fluorescence-activated cell sorting (FACS) for clones expressing full-length IL-2 muteins, as indicated by the presence of both Myc and HA tags.

[0871] The resulting population was then sorted twice to further select clones that showed both high expression of the encoded IL-2 mutein, as measured by staining with anti-Myc antibody and appropriate fluorescent secondary antibody, and high binding capacity of the expressed IL-2 mutein for the low affinity IL-2 receptor (IL2-Ra/CD25) (FIG. 2). Specifically, yeast cells were incubated with varying levels of recombinant human CD25 containing 6xHis tag (“6xHis” disclosed as SEQ ID NO: 1028), and the amount of bound CD25 was determined by flow cytometry using anti-6xHis antibody (“6xHis” disclosed as SEQ ID NO: 1028) and appropriate fluorescent secondary antibody. Sanger sequencing of individual clones and sequencing of the entire population using next-generation sequencing were used to identify enriched mutations.

[0872] The V69A mutation appeared with very high frequency after performing the sorting steps. This mutation has been reported, in conjunction with Q74P, to increase affinity for CD25 as described in Rao et al. (2005) Biochem 44:10696-10701. To confirm this observation, an IL-2 mutein comprising the amino acid substitutions V69A/Q74P was evaluated in the following assays. Briefly, individual yeast clones expressing IL-2 or IL-2 muteins having amino acid substitution(s) V69A/Q74P, E68Q, V69A, 1114W, L721, N71Y, or M104D on their surface were titrated with recombinant CD25 to determine the binding affinity (K_{D}) and the relative fraction of active IL-2 molecules on the yeast surface (as determined by the relative binding capacity=the ratio of bound CD25 to expressed IL-2 mutein). Several mutations greatly increased the fraction of active IL-2 molecules expressed on the yeast cell surface, but none increased binding affinity for CD25. In disagreement with the previous report, V69A/Q74P decreased binding affinity to CD25 (FIG. 3A) while providing the highest observed fraction of active IL-2 molecules tested (FIG. 3B). These results indicate that the V69A/Q74P substitutions do not increase the binding affinity of the IL-2 molecule for CD25, but rather stabilize the IL-2 molecule in an active conformation sufficient for binding to CD25.

[0873] To further evaluate the effect of the V69A/Q74P substitutions on IL-2 stability, both the wild-type IL-2 sequence and the V69A/Q74P IL-2 sequence were cloned into a plasmid for expression in human cells as a fusion with the Fc portion of human IgG1, which includes the mutation N297G to remove a glycosylation site on the Fc (SEQ ID NO: 40). Both proteins were transfected into the Expi293 expression system (Thermo Fisher Scientific), purified from supernatant using protein A, and analyzed for stability. The fusion protein containing wild-type IL-2 (WT) was largely aggregated as determined by both analysis of its melting temperature (FIG. 4A) and by size-exclusion chromatography (FIG. 4B). Taken together, the combination of assays using yeast surface expression and analysis of IL-2-Fc fusion proteins exemplifies mutations, especially V69A and the combination V69A/Q74P, that increase the stability of IL-2 with no more than a minimal effect on binding affinity for CD25.

### Example 2: Generation of IL-2 Muteins that Reduce Binding Affinity to Components of the Intermediate-Affinity IL-2 Receptor (CD122, CD132, or CD122/CD132 Dimer)

[0874] IL-2 muteins were generated by using error-prone PCR to introduce random mutations into the nucleotide sequence of a gene encoding a human IL-2 polypeptide having the amino acid substitutions V69A and Q74P. Yeast cells expressing IL-2 muteins were incubated with recombinant 6xHis-tagged (“6xHis” disclosed as SEQ ID NO: 1028) CD25 followed by FACS analysis to isolate yeast cell clones expressing high-levels of fully functional/active IL-2 muteins as in Example 1.

[0875] FACS analysis was further used to isolate yeast cell clones expressing IL-2 muteins with reduced binding to the dimeric IL-2 receptor (CD122/CD132). The CD122/CD132 IL-2 receptor was generated as a heterodimer by expressing CD122 fused to an IgG1 Fc and CD132 fused to a different Fc with mutations introduced into each Fc so that they selectively pair with each other (a knob-hole heterodimer) when expressed together in the same cell (knob mutations S354C/T366Q and hole mutations Y349C/T366S/L368A/Y407V as reviewed in Liu et al. (2017) Frontiers in Immunology 8:38). After staining yeast cells with 10 nM (FIG. 5A) or 50 nM (FIG. 5B) of CD122/CD132 heterodimer, the bound receptor dimer was detected using anti-human Fc fluorescent secondary antibody and sorted with various gates as shown (FIGS. 5A and 5B). Clones enriched by each sorting strategy were determined as in Example 1. Receptor binding affinities of selected yeast cell clones were measured by titrating yeast cells with a concentration range of CD122/CD132 heterodimer (FIG. 6A) or with recombinant extracellular domain of CD25 IL-2 receptor (FIG. 6B). The amount of bound antibody was measured by flow cytometry on an Accuri C6 or IntelliCyt iQue flow cytometer and curve fitting used to determine the K_{D} (Table 2). Overall, mutations selected for reduced binding to CD122/CD132 Fc heterodimer show reduced binding affinity to that receptor but not to CD25.

[0876] Several of these IL-2 sequences, along with additional sequences identified from sequences not tested individually in the yeast display format, were transferred into plasmids for expression and purification as Fc fusion proteins as in Example 1. Specifically, the indicated mutation(s) was introduced into the base sequence of IL-2 V69A/Q74P/C125S (SEQ ID NO: 2), fused at its C-terminus to a 20-amino acid linker comprising the sequence (G₄S)₄ (SEQ ID NO: 48) followed by IgG1 Fc fragment containing N297G mutation (SEQ ID NO: 40). An Octet instrument (Molecular Devices, LLC) was used to determine affinity for CD122/CD132 heterodimer in this format. Specifically, IL-2-Fc fusion proteins were captured on anti-human Fc tips at optimized density, and association and dissociation rates determined across a range of concentrations of receptor. Representative data show that lower affinity was apparent when wild-type IL-2 was compared to a mutant form (FIG. 7), with observed K_{D} values summarized in Table 3.

[0877] Additionally, the IL-2 mutein, IgG1 Fc fusion polypeptides were expressed as monomeric proteins by introducing mutations into the Fc domain that prevented their dimerization, but still allowed for purification by protein A. Additionally, an amino acid sequence was added to each molecule to allow site-specific biotinylation by the enzyme BirA. These fusions were first expressed in Expi293 cells, then purified by protein A chromatography, and were site-specifically biotinylated. An Octet instrument (Molecular Devices, LLC) and streptavidin biosensors, were used to capture the biotinylated fusions and determine the affinity for the CD122/CD132 heterodimer as well as CD25 in this format. Specifically, the CD122/CD132 knob-hole heterodimer was applied to the biosensor and association and dissociation rates were determined across a range of concentrations of receptor. Representative data with observed K_{D} values is summarized in Table 11.

[0878] These results exemplify the generation and isolation of IL-2 muteins with a range of affinities for the intermediate-affinity dimeric CD122/CD132 IL-2 receptor.

TABLE 2
IL-2 K_{D} for CD122/CD132 Fc heterodimer and CD25
extracellular domain measured in yeast surface display

| Mutations | CD122/CD132 | CD25 |
|---|---|---|
| (all contain V69A/Q74P) | KD (nM) | KD (pM) |
| None | 1.7 | 90 |
| I28T | 7.0 | Not tested |
| H16D | 11.2 | 71 |
| H16L | 12.9 | 58 |
| H16N | 4.2 | 78 |
| N88L | 71 | 25 |
| N88S | 10.0 | Not tested |

Also tested with minimal effect observed

| | | |
|---|---|---|
| I28F | 1.7 | 50 |
| E67K | 2.8 | 85 |
| R81F | 1.1 | 58 |
| N90T | 1.7 | 60 |
| N90H | 1.9 | 81 |
| E110Y | 1.7 | 42 |
| E110K | 1.9 | 61 |
| E116T | 2.0 | 64 |
| E116A | 1.5 | 51 |
| Q126T | 1.9 | 98 |
| Q126R | 2.0 | 92 |
| Q126K | 2.2 | 109 |
| Y31D | 1.4 | 43 |
| T37W | 1.1 | 41 |
| T102G | 1.4 | 47 |
| F103D | 1.2 | 44 |
| A108Q | 1.2 | 49 |
| T111A | 1.1 | 60 |
| I114V | 1.3 | 43 |

TABLE 3
Selected IL-2-Fc fusion protein, K_{D} for CD122/CD132 Fc
heterodimer and CD25 extracellular domain measured by Octet binding

| Mutations | CD122/CD132 | CD25 |
|---|---|---|
| (all contain V69A/Q74P) | KD (nM) | KD (nM) |
| None | 3.9 | 1.0 |
| H16N | 8.7 | 0.8 |
| I92S | 12.9 | 0.6 |
| D84V | 21.1 | 0.6 |
| Q126R | 2.4 | 0.6 |
| P34T | 2.7 | 0.8 |
| D109N | 2.5 | 0.7 |
| S87R | 9.5 | 0.9 |
| R120G | 5.9 | 1.0 |
| I24L | 5.4 | 0.8 |
| T101R | 3.7 | 0.8 |
| T41K | 2.4 | 0.5 |
| N88S | 21.5 | 0.9 |
| F42A, Y45A, L72G, N88D | 66.4 | Not detected |
| (negative control) | | |
| R38A, F42K, N88D | 79.6 | Not detected |
| (negative control) | | |

TABLE 11
Selected IL-2-Fc fusion protein, fusion location,
K_{D} for CD25 extracellular domain and
CD122/CD132 Fc heterodimer measured by Octet binding

| | IL-2 Fusion | CD25 | CD122/CD132 |
|---|---|---|---|
| Mutations | location | K_{D} (nM) | K_{D} (nM) |
| None | N-terminus | 0.19 | 5.30 |
| None | C-terminus | 0.54 | 3.04 |
| H16N, V69A, Q74P, C125S | N-terminus | 0.44 | 22.3 |
| H16L, V69A, Q74P, C125S | N-terminus | 0.36 | 122 |
| N88D | C-terminus | 1.01 | 24.0 |
| V91K | C-terminus | 0.69 | 7.56 |

### Example 3: IL-2-Fc Fusion Proteins with Reduced CD122/CD132 Receptor Affinity Specifically Activate CD25+Foxp3+T Regulatory Cells

[0879] The ability of IL2-Fc fusion proteins with altered IL-2 receptor affinity to specifically activate Treg cells was evaluated. Briefly, the ability of exemplary IL-2-Fc fusion proteins with mutations that reduce CD122/CD132 receptor affinity (H16N, H16L, I92S, D84V and S87R) to induce IL-2 signaling in CD25+Foxp3+ T regulatory cells was compared to induction of signaling in CD25^{High}Foxp3− T helper cells (defined as CD4+CD25^{High}Foxp3− lymphocytes) and in natural killer cells (NK cells, defined as CD3-CD56+ lymphocytes) using a flow cytometry-based pSTAT5 assay described further below (FIG. 8). Linker and Fc regions comprising the IL2-Fc fusion proteins in this Example were as described in Example 2. The CD25+T helper cells are measured in this assay because they represent the most likely unintended target of an IL-2-based therapeutic intended to treat diseases or disorders involving aberrant immune activation. The parent IL-2-Fc fusion protein (SEQ ID NO: 2), that does not contain a mutation known to affect IL-2 receptor affinity and a similar molecule in clinical trials (an irrelevant antibody with IL-2 fused to its C-terminus and containing the N88D mutation in IL-2 (C-term N88D, as described as IgG-(IL-2N88D)₂ in Peterson et al. Journal of Autoimmunity (2018) 95: 1-14) were used as comparators.

[0880] Frozen human PBMCs (ATCC) were thawed and divided into 96-well plates. After resting 2 hours cells were treated for 30 minutes with a range of concentrations of the IL-2-Fc fusion proteins, native IL-2, or comparator molecule. After treatment, the cells were fixed with formaldehyde to “pause” their signaling processes, then treated with cold methanol to remove their plasma membrane. Cells were then stained with fluorescent antibodies that recognize markers of cell identity. For example, T regulatory cells are CD4+CD25^{high}Foxp3+, IL-2 responsive non-T regulatory cells are CD4+CD25^{high}Foxp3−, and NK cells are CD3-CD56+). The cells were also stained with an antibody (Cell Signaling Technology Cat #9365 and #14603) that binds to the transcription factor STAT5 phosphorylated at tyrosine 647 (pSTAT5). pSTAT5 is produced as a direct result of IL-2 signaling by receptors on the cell surface, making it a suitable marker for IL-2 signaling. Flow cytometry was used to measure markers of cell identity (FIG. 8), along with the level of pSTAT5. The concentration of IL-2-Fc fusion protein that causes each cell population to reach 50% of its maximum signaling output (the EC₅₀) was determined, as well as the maximum signaling output that could be obtained. For analysis purposes, maximum signaling output is normalized to the maximum signaling obtained using IL-2-Fc protein containing only V69A/Q74P mutations in the IL-2.

[0881] FIGS. 9A, 9B, 9C, and 9D show the level pSTAT5 signaling in CD25+ Treg cells and CD25+ non-Treg cells, NK cells, and CD8+ cytotoxic T cells, respectively, following incubation with a range of concentrations of the IL-2-Fc fusion proteins, as indicated. As expected, all the mutant IL-2-Fc molecules have reduced potency in activating signaling compared to the wild-type molecule containing only V69A/Q74P. They all show increased specificity for Tregs when compared to the wild-type molecule (in CD25^{High} T helper cells, NK cells, and the CD8+ cytotoxic T cells, the EC50 shifts farther than in Tregs, the maximum activation decreases more than Tregs, and/or signaling in the non-T reg populations because unmeasurable). Further, the C-term N88D IL-2-Fc fusion protein shows lower induction of pSTAT5 signaling in Tregs than do all the IL-2-Fc fusion proteins tested (except for the negative control molecule). The C-term N88D has no detectable signaling on the non-T reg cell types so relative specificity could not be determined (FIG. 8 and Table 4).

[0882] These results demonstrate that specific mutations that reduce CD122/CD132 receptor affinity (e.g., H16N, H16L, I92S, D84V, S87R) in a human IL-2 polypeptide comprising an IL-2-Fc fusion protein increase its ability to specifically activate T regulatory cells relative to CD25^{high} T helper cells and NK cells, measured by a combination of EC₅₀ and maximum activation, with different muteins displaying a variety of behaviors in each respect. Further, these data demonstrate that some IL-2-Fc fusion proteins tested as described above have a greater ability to activate T regulatory cells than the comparator molecule C-term N88D molecule.

TABLE 4
Signaling potency (EC₅₀ and maximum activation) of IL-2-Fc fusion
proteins on Tregs, CD25^{high} T helper cells and NK cells in human PBMCs

| | IL-2 | | | | | | |
|---|---|---|---|---|---|---|---|
| | Variant | Treg | | CD25^{high} T helper | | NK cells | |
| IL-2-F Fusion | SEQ | EC₅₀ | Max. | EC₅₀ | Max. | EC₅₀ | Max. |
| Protein | ID NO | (nM) | Signal | (nM) | Signal | (nM) | Signal |
| V69A/Q74P | 2 | 0.001 | 1 | 0.007 | 1 | 2.6 | 1 |
| H16N/V69A/Q74P | 4 | 0.003 | 0.82 | >50 | ~0.5 | >50 | N.D. |
| H16L/V69A/Q74P | 5 | 0.238 | 1.22 | 0.827 | 0.29 | N.D. | N.D. |
| I92S/V69A/Q74P | 11 | 0.009 | 0.78 | N.D. | N.D. | N.D. | N.D. |
| D84V/V69A/Q74P | 7 | 0.013 | 1.20 | N.D. | N.D. | N.D. | N.D. |
| S87R/V69A/Q74P | 8 | 0.002 | ~1 | ~1 | ~1 | 10.2 | 0.83 |
| Inactive IL-2 | 30 | N.D. | N.D. | N.D. | N.D. | N.D. | N.D. |
| C-term N88D | NA | 0.37 | 0.50 | N.D. | N.D. | N.D. | N.D. |

EC₅₀ and maximum pSTAT5 signal induced by the indicated IL-2-Fc fusion for each cell type after 30 minutes as measured in human PBMCs.
Values are determined by curve fitting to data in FIG. 8. Values indicated with ~ are visual estimates due to poorly converged estimates from fitting.
N.D. indicates that meaningful pSTAT5 was not detected.

### Example 4: IL2-Fc Fusion Proteins with Moderate Affinity for CD25 have Enhanced Specificity for Tregs Compared to Other CD25^{high} T Cells

[0883] Previous work has developed IL-2 muteins with greatly reduced affinity for CD25 because such molecules may be useful in the context of treating cancer (Levin et al. Nature (2012) 484:529-533). Other work has aimed to increase the affinity for CD25 based on the hypothesis that this may increase activity toward Tregs relative to other cell types, which may be useful for treating diseases involving aberrant activity of the immune system. The ability of IL-2 mutations that moderately reduce affinity to CD25 to increase specific activation of Tregs has not been explored. We used data from yeast surface display experiments in Examples 1 and 2 to identify amino acid positions that are permissive to mutation, then compared those positions to residues that contact CD25 in a published structure of the IL-2/CD25 complex (Stauber et al. Proc Natl Acad Sci USA (2006) 103(8):2788-2793). In particular, IL-2 residues K35, R38, F42, and E68 make contact with the CD25 and permit mutations. Existing mutations have targeted R38, F42 and E68 to eliminate CD25 affinity (Carmenate et al. J Immunol (2013) 190(12):6230-6238, and a K35 mutation has been reported to improve IL-2 stability (Rojas et al. Scientific Reports (2019) 9:800).

[0884] A series of IL-2-Fc fusion proteins were generated containing mutations at these positions. Specifically, the indicated mutation(s) was introduced into the base sequence of IL-2 V69A/Q74P (SEQ ID NO: 2), fused at its C-terminus to a 20-amino acid linker comprising the sequence (G₄S)₄ (SEQ ID NO: 48) followed by IgG1 Fc fragment containing N297G mutation (SEQ ID NO: 40). Specific mutations tested were K35E, R38Q, R38N, R38E, F42Q, F42K, E68N and E68Q. IL-2 signaling activity of these exemplary IL-2-Fc fusion proteins in Tregs, CD25^{high} T helper cells and NK cells in human PBMCs was determined as in Example 4. The parent IL-2-Fc fusion protein (SEQ ID NO: 2) that does not contain a mutation known to affect IL-2 receptor affinity, was used as a comparator. E68N and E68Q were indistinguishable from wild type in this assay and are not included below.

[0885] FIGS. 10A, 10B, and 10C show the level pSTAT5 signaling in Treg cells, CD25^{high} T helper cells, and NK cells, respectively, following incubation with a range of concentrations of the IL-2-Fc fusion proteins, as indicated. Table 5 shows the EC₅₀ for Tregs vs CD25^{high} T helper cells, along with the specificity (calculated as the ratio of CD25^{high} T helper EC₅₀ divided by Treg EC₅₀). As expected, reducing the affinity for CD25 also reduced signaling in Tregs and CD25^{high} T helper cells, but had little or no impact on NK cells (which do not express CD25). In a result that was consistent with our hypothesis but unexpected given prior art, reducing affinity for CD25 also increased specificity for Tregs over the CD25^{high} T helper cells. This was especially pronounced for R38N and K35E mutations, but the effect occurs across all the mutein tested.

TABLE 5
Signaling potency and specificity toward T regulatory of IL-2-Fc
fusion proteins with reduced affinity for CD25

| | IL-2 | | | | |
|---|---|---|---|---|---|
| | Variant | CD25 K_{D} | | CD25^{high} | |
| IL-2-Fc | SEQ ID | (nM yeast | Treg | T helper | |
| Fusion Protein | NO | display) | EC₅₀ (nM) | EC₅₀ (nM) | Ratio |
| V69A/Q74P | 2 | 0.27 | 0.001 | 0.0007 | 7.1 |
| R38Q/V69A/Q74P | 17 | 1.47 | 0.0025 | 0.0071 | 28.4 |
| R38N/V69A/Q74P | 22 | 1.82 | 0.0049 | 13.8 | 2822 |
| R38E/V69A/Q74P | 27 | N.D. | 1.717 | 15.5 | 9.0 |
| F42Q/V69A/Q74P | 29 | N.D. | 0.087 | 2.25 | 25.9 |
| F42K/V69A/Q74P | 28 | N.D. | 1.381 | 22.0 | 15.9 |
| K35E/V69A/Q74P | 12 | 0.78 | 0.002 | 0.60 | 300 |

IL-2 muteins at the interface with CD25 tested for binding to CD25 in a yeast display titration assay, and for signaling potency in human PBMCs by measuring pSTAT5 levels after 30 minutes in T regulatory cells (CD4+CD25^{high}Foxp3+) and CD25^{high} T helper cells (CD4+CD25^{high}Foxp3−). Signaling potency determined by fitting to the titrations shown in FIG. 9.
N.D.-binding not detected

[0886] These results demonstrate that specific mutations that reduce CD25 receptor affinity (e.g., R38Q, R38N, R38E, F42Q, F42K, K35E) in a human IL-2 polypeptide comprising an IL-2-Fc fusion protein increases the ability to specifically activate T regulatory cells relative to other CD25^{high} T cells. Further, these results demonstrate that the amino acid residue selected for substitution at a certain position within the IL-2 polypeptide (e.g., R38Q, R38N, R38E) comprising an IL-2-Fc fusion protein differentially affects the extent of T regulatory cell activation and selectivity. There is a window where reduced CD25 affinity leads to greatly increased selectivity for Tregs over other CD25^{high} T cells. In the assay presented here, that window begins at roughly 50% decrease in potency toward Tregs (2× baseline EC₅₀), with a maximum around 80% decreased potency (5× baseline EC50). The additional selectivity decreases by the point of 87× decreased potency toward Tregs. Because selective activation of Tregs over other T cells is believed to be useful for therapeutic benefit in treating many immune disorders, mutations at these positions are likely to impart useful properties on a clinical molecule.

### Example 5: IL-2-Fc Fusion Proteins with Mutations Affecting Binding to Both CD122/CD132 and CD25 Maintain Specificity for T Regulatory Cells Over CD25^{high} T Cells and NK Cells

[0887] Because mutations affecting binding to CD122/CD132 dimer provide specificity for Tregs over NK cells and non-Treg T cells, and CD25 mutations independently provide specificity Tregs over CD25^{high} T helper cells, combination mutations may have novel combinations of specificity and potency that would be useful in an immune-modulatory therapeutic. We produced IL-2-Fc fusion proteins as in Examples 1, 3 and 4 and tested their ability to signal in pSTAT5 assays using human PBMCs as in Examples 3 and 4.

[0888] FIGS. 11A, 11B, and 11C show the level pSTAT5 signaling in Treg cells, CD25^{high} T helper cells, and NK cells, respectively, following incubation with a range of concentrations of indicated IL-2-Fc fusion proteins (muteins containing R38E are not shown because they have low potency on Tregs, see Table 6). All data shown here use PBMCs from a single human donor, but it is not the same donor as shown in earlier examples. Data are split between a top and bottom panel so that individual curves are visible. The control IL-2-Fc fusion containing only V69A/Q74P mutations is shown in every panel. Importantly, all combination muteins retain the ability to activate IL-2 signaling in Treg cells, with potency on Tregs spanning approximately 3 orders of magnitudes. Relative specificity against CD25^{high} T helper cells and NK cells could not be determined because most muteins did not generate enough pSTAT5 at any concentration to be assayed reliably. The fact that potency on Tregs is still easily detectable but pSTAT5 signaling on other cell types is barely detectable indicates that combinations of mutations targeting the interactions with CD122/CD132 and with CD25 largely retain their selectivity toward Tregs.

TABLE 6
Potency on Tregs (EC₅₀) of IL-2-Fc fusion proteins containing
combinations of mutations targeting the interfaces
with CD25 and CD122/CD132

| IL-2-Fc Fusion Protein (all | IL-2 Variant | Treg |
|---|---|---|
| contain V69A/Q74P/C125S) | SEQ ID NO | EC₅₀ (nM) |
| None | 2 | 0.039 |
| K35E/H16N | 13 | 0.022 |
| K35E/I925 | 16 | 0.93 |
| K35E/R38N/H16N | 38 | 9.8 |
| R38N/H16N | 23 | 0.18 |
| R38N/D84V | 25 | 0.76 |
| R38N/S87R | 31 | 0.017 |
| R38N/I92S | 26 | 3.2 |
| R38Q/H16N | 18 | 0.55 |
| R38Q/I92S | 21 | 1.0 |
| R38E/H16N | 32 | 49 |
| R38E/D84V | 33 | 65 |
| R38E/587R | 34 | 39 |
| R38E/I92S | 35 | 207 |
| F42Q/H16N | 36 | 13 |
| F42Q/I92S | 37 | 37 |

### Example 6: Flexible, Helical and Rigid Linkers Minimally Affect Function and Stability of IL-2-Fc Fusions

[0889] The functional properties of some fusion proteins, their expression levels and thermal stability have been shown to be improved with the incorporation of Pro-rich linkers and helical linkers that are more rigid than the (G₄S)ₓ (SEQ ID NO: 1029) flexible linker (Zhao et al., Protein Expr Purif (2008) 61: 73-77)).

[0890] To test if the rigidity and increased length of the linker can improve the thermal stability and signaling activity of the IL-2 muteins while still retaining their specificity for activating regulatory T cells, Fc fusion proteins containing stabilized IL-2 (V69A/Q74P mutein) and IL-2 containing a mutation that reduces affinity for CD122 (V69A/Q74P/H16N) with 8 different linkers (IL2-Li-Fc, Table 7) were designed and expressed. Linkers tested have one or more of several characteristics. Some linkers are Proline rich and incorporate N-glycosylation sites that add to the rigidity of the linker peptides. Other linkers tested are α-helical rigid linkers (Arai et al., Protein Eng (2001) 14(8): 529-532). Some of the other linkers are naturally occurring linkers found in multiple domain proteins and some are Proline rich artificially designed sequences.

[0891] Some of the IL-2-Li-Fc fusion proteins with the new linkers exhibit slightly improved thermal stability compared to the IL-2-(G₄S)₄_Fc linker (“(G₄S)₄” disclosed as SEQ ID NO: 48) in a Differential Scanning Fluorimetry (DSF) assay with the fluorescent protein-dye SYPRO orange (Table 7).

[0892] To evaluate the effect of different linkers on the biological activity of the IL-2-Li-Fc fusion protein, pSTAT5 signaling assay described in earlier examples was used. The pSTAT5 assay was used to assess the effect of linkers on the selectivity and activity of IL-2-Li-Fc fusion proteins in the context of a stabilized IL-2 (containing V69A/Q74P/C125S) and stabilized IL-2 including the H16N mutation that confers selectivity toward Tregs. Comparison of the EC50s of IL-2-Li-Fc fusion proteins with different linkers shows that most linkers were similar to or slightly more active than IL-2-Fc fusions with (G₄S)₄ linker (SEQ ID NO: 48) (Table 8). Some linkers showed notably lower activity (v5 and v7 with H16N mutation).

TABLE 7
Amino acid sequence of linkers tested (Li) and melting
temperature of the IL-2-Fc in wild-type (WT, contains
V69A/Q74 mutations) and H16N formats (V69A/Q74P/H16N)

| | | SEQ ID | Tm | Tm |
|---|---|---|---|---|
| Description | Sequence | NO | (WT) | (H16N) |
| Linker v1 | AGSGGSGGSGGSPVPSTPPTNSSSTPPTPSPS | 49 | 48.8 | 49 |
| | ASGS | | | |
| Linker v2 | AGSGGSGGSGGSPVPSTPPTPSPSTPPTPSPS | 50 | 48.5 | 49.5 |
| | GGSGNSSGSGGS | | | |
| Linker v3 | AGSGNSSGSGGSGGSGNSSGSGGSPVPSTPP | 51 | 49.3 | 50.4 |
| | TPSPSTPPTPSPSASGS | | | |
| Linker v4 | AEAAAKEAAAKEAAAKEAAAKAGS | 52 | 48.4 | 48.8 |
| Linker v5 | GTTPNPPASSSTTGSSTPTNPPAGS | 53 | 48.2 | 49.3 |
| Linker v6 | AGSPGAGNGGNNGGNPPPPTTTTSSAPATT | 54 | 48.4 | 48.8 |
| | TTASAGS | | | |
| Linker v7 | GGGSAGGGSAGGGSAGGGSAGS | 55 | 47.9 | 45.5 |
| (G₄S)₄ | GGGGSGGGGSGGGGSGGGGS | 48 | 46.5 | 45.7 |
| (SEQ ID | | | | |
| NO: 48) | | | | |

TABLE 8
Signaling potency determined by pSTAT5 signaling assay with human
PBMCs for of IL-2-Fc proteins with various linkers on Tregs,
CD25^{high} T helper cells and NK

| | Tregs CD4+ | T Helper CD4+ | NK cells |
|---|---|---|---|
| IL-2 variant | CD25^{High}FoxP3+ | CD25^{High} FoxP3− | CD3−CD56+ |
| (linker) | EC50 (nM) | EC50 (nM) | EC50 (nM) |
| H16N (v1) | 0.003 | 0.113 | Not detected |
| H16N (v2) | 0.003 | 0.090 | Not detected |
| H16N (v3) | 0.009 | 0.101 | Not detected |
| H16N (v4) | 0.005 | 0.243 | 13.5 |
| H16N (v5) | 0.052 | 2.6 | Not detected |
| H16N (v6) | 0.011 | 0.96 | Not detected |
| H16N (v7) | 0.026 | 2.68 | Not detected |
| H16N (G₄S)₄ | 0.008 | 1.04 | 6.1 |
| (SEQ ID | | | |
| NO: 48) | | | |
| WT (v1) | 0.003 | 0.008 | 2.6 |
| WT (v2) | 0.004 | 0.007 | 1.7 |
| WT (v3) | 0.007 | 0.016 | 2.0 |
| WT (v4) | 0.003 | 0.005 | 1.0 |
| WT (v5) | 0.022 | 0.101 | 7.6 |
| WT (v6) | 0.012 | 0.046 | 8.2 |
| WT (v7) | 0.014 | 0.068 | 10.4 |
| WT (G₄S)₄ | 0.006 | 0.009 | 2.0 |
| (SEQ ID | | | |
| NO: 48) | | | |

### Example 7: IL-2-Fc Fusion Proteins with Reduced CD122 Receptor Affinity Specifically Expands T Regulatory Cells In Vivo

[0893] The ability of IL2-Fc fusion proteins with altered IL-2 receptor affinity to specifically activate T regulatory cells in mice was evaluated. Briefly, Tg32 mice (Jackson Labs, Bar Harbor Me., stock #014565) expressing human FcRn were injected once via tail vein injection once with a range of doses (0.5 μg to 15 μg) of the H16N fusion protein comprising the 20aa GS linker (G₄S)₄ (SEQ ID NO: 48) fused to the N-terminus of IgG1 Fc with an N297G mutation. Control mice were treated with an equimolar amount (1 μg to 30 μg) of the C-term N88D fusion protein. Lymphocyte levels were determined by flow cytometry prior to dosing, then at 3, 5- and 7-days post-injection. To determine the in vivo effect(s) of the IL-2-Fc fusion proteins several key parameters were measured: T cells as a fraction of total lymphocytes, Foxp3+ Tregs as a fraction of T cells, CD4+ T helper cells (excluding Tregs) as a fraction of T cells, CD8+ T cells as a fraction of T cells, and natural killer (NK) cells as a fraction of total lymphocytes. Specifically, total lymphocytes were defined as viable CD45+ cells, T cells as viable CD45+CD3+, Tregs as viable CD45+CD3+CD4+CD25^{high}CD127− cells, T helper as viable CD45+CD3+CD4+ not CD25^{high} and CD127−, CD8+ T cells as viable CD45+CD3+CD8+ cells, and NK cells as viable CD45+CD3−NK1.1+.

[0894] FIG. 12 shows T regs as a percentage of total T cells. Both molecules show a strong dose-dependent increase at 3 days, declining at later time-points. The response to IL-2-Fc H16N is more sustained in these mice, suggesting that this molecule exerts activity over a longer time. Data in FIG. 12A and FIG. 12B are plotted as an average of responses relative to baseline (pre-treatment values) for three mice for each dose at each time point, while FIG. 12C shows data for individual mice treated with the highest dose of each molecule. FIG. 13 and FIG. 14 show the percent of T cells that were T helper cells and CD8+ T cells respectively following treatment with each dose of IL-2-Fc fusion protein or of C-term N88D. There is a clear dose-dependent decrease after 3 days in T effectors as a fraction of the total, with the effect declining at later time-points. There is no meaningful difference between dose-matched response to the two molecules.

[0895] FIG. 15A and FIG. 15B show the NK cell response (NK cells/total lymphocytes) of mice treated with IL-2-Fc H16N and C-term N88D, respectively. Data are plotted as an average of NK cell percentage relative to baseline (pre-treatment values) for three mice for each dose at each time point. In mice treated with IL-2-Fc H16N, at day 3 the fraction of NK cells decreases slightly at low doses or increases slightly at high doses, in a dose-dependent manner. The effect declines at later time-points. In contrast, in mice treated with C-term N88D dose-dependent stimulation of NK cell expansion was observed to a much greater extent than in treatment with the IL-2-Fc H16N protein. NK cells as a fraction of total lymphocytes, relative to baseline, for individual mice treated with the highest dose of each molecule is shown in FIG. 15C.

[0896] Taken together, these results demonstrate that treatment of mice with IL-2-Fc H16N fusion protein induces a selective expansion of Foxp3+T regulatory cells. In contrast to the comparator molecule, IL-2-Fc H16N induces expansion of T regs over a longer period of time and induces much less expansion of NK cells in vivo.

### Example 8: Reducing the IL-2 Receptor Binding Affinity of IL-2-Fc Fusion Proteins Extends their Lifetime In Vivo

[0897] An important advantage of IL-2-Fc fusion proteins over existing therapy using IL-2 is expected to be extended lifetime in vivo (Bell et al. J Autoimmunity (2015) 56: 66-80). In the context of an Fc or antibody fusion protein, it is hypothesized that binding to the IL-2 receptors is a major route of clearance in vivo. We have tested this by treating Tg32 mice with an IL-2-Fc fusion protein that has reduced affinity for both CD25 and CD122 receptors (mutations F42A, Y45A, L72G, N88D, V69A, Q74P, C125S (SEQ ID NO: 30). FIG. 16 shows binding data that demonstrates the reduced affinity for both CD25 and CD122 compared to IL-2-Fc containing only V69A/Q74P/C125S mutations, and IL-2-Fc Inactive does not cause pSTAT5 phosphorylation in vitro in human PBMCs at any concentration tested (FIG. 9A).

[0898] Plasma was collected from mice treated as in Example 7 with IL-2-Fc fusion proteins or C-term N88D. The amount of IL-2-Fc fusion protein or C-term N88D present at each time-point was measured using an ELISA assay with anti-IL-2 capture antibody (R&D Systems, AF-202) and anti-human Fc secondary antibody conjugated to horseradish peroxidase (Jackson ImmunoResearch 109-035-008). For analysis, 100% of starting material was defined as the amount detectable in blood plasma 1 hour after injection. Equimolar amounts of IL-2-Fc H16N and C-term N88D show essentially identical clearance kinetics at each dose level (FIG. 17A and FIG. 17B). In contrast, IL-2-Fc Inactive persists longer, especially at low doses (FIG. 17C and FIG. 17D).

[0899] This exemplary molecule demonstrates that lowering the affinity for IL-2 receptors could increase the lifetime of a therapeutic molecule in vivo. IL-2 mutations that reduce affinity for CD25 but retain activity on Tregs, such as those described in Example 4, could be used to extend the therapeutic lifetime of these IL-2-Fc fusion proteins, thereby extending the duration of clinical benefit and reducing the need for frequent dosing.

### Example 9: IL-2-Fc Fusion Proteins Expand T Regulatory Cells, T Helper Cells, and NK Cells In Vivo in Humanized Mice

[0900] NOD scid gamma (NSG) mice were lethally irradiated and reconstituted with human CD34+ umbilical cord stem cells in order to investigate the response of human immune cells to the IL-2-Fc fusion proteins. Seven experimental groups, with six mice in each group, were reconstituted using CD34+ umbilical cord stem cells isolated from three different human donors. Each donor reconstituted two mice per experimental group. After engraftment had fully occurred, the mice were injected subcutaneously with a low and/or a high dose of a control monoclonal antibody (Motavizumab), a control IL-2 Fc fusion protein with an inactive IL-2 moiety, a control IL-2 Fc fusion protein with a wild-type IL-2 protein, and three different IL-2-Fc fusion proteins comprising different mutations within the IL-2 moiety. Table 12 summarizes the doses and experimental treatment groups investigated. Following injection, blood was obtained from the mice at various timepoints, as indicated in FIG. 18A, and flow cytometry was performed to measure the various lymphocyte populations at these timepoints (FIG. 18A). Fold-expansion of T regulatory cells, T helper cells and NK cells at up to day 9 following dosing was quantified by flow cytometry similarly to Example 7, and is shown in FIG. 18B, FIG. 18C, and FIG. 18D, respectively.

TABLE 12
IL-2-Fc fusion proteins and control proteins and
corresponding doses administered to the humanized
mice reconstituted with human CD34+ umbilical cord stem cells

| Experimental | | | |
|---|---|---|---|
| Group (6 | | | High Dose |
| mice per group) | Treatment | Low Dose (μg/kg) | (μg/kg) |
| 1 | Motavizumab | 800 μg/kg (equimolar) | |
| 2 | Inactive IL-2 | 400 μg/kg | |
| 3 | N88D (C-term) | 100 μg/kg (equimolar) | 800 μg/kg |
| | | | (equimolar) |
| 4 | Wild-type IL-2 | 50 μg/kg | 400 μg/kg |
| 5 | H16N, V69A, | 50 μg/kg | 400 μg/kg |
| | Q74P, C125S | | |
| | (SEQ ID NO: | | |
| | 1007) | | |
| 6 | H16L, V69A, | 50 μg/kg | 400 μg/kg |
| | Q74P, C125S | | |
| | (SEQ ID | | |
| | NO: 1008) | | |

### Example 10: IL-2-Fc Fusion Proteins have Lifetime of Days in Circulation

[0901] Tg32 mice (Jackson Labs, Bar Harbor Me., stock #014565) were injected subcutaneously with 5 μg of an IL-2 fusion protein comprising a combination of mutations (FIGS. 19A-19B). All IL-2 fusion proteins investigated contained the V69A/Q74P/C125S mutations in combination with either the H16N, H16L, or I92S mutation (FIG. 19A). These correspond to SEQ ID NOs: 1007, 1008, and 1009, respectively. Additionally, the half-life of two IL-2 fusion proteins comprising the H16N/V69A/Q74P/C125S mutations in the IL-2 moiety with or without an additional mutation in the Fc region were compared (FIG. 19B). These IL-2 fusion proteins correspond to SEQ ID NOs: 1007 and 135. Following injection with the exemplary IL-2 fusion proteins, blood was collected at the time points indicated in FIGS. 19A-19B. Plasma was isolated from the blood and the concentrations of the IL-2 fusion proteins were measured as described in Example 8.

[0902] As depicted in FIG. 19A, all IL-2 fusion proteins with the indicated mutations showed maximum distribution within the first 12 hours after injection. The I92S mutation led to the greatest amount of circulating IL-2 fusion protein in the plasma of the mice.

[0903] As shown in FIG. 19B, increasing the affinity of the Fc sequence for FcRn (SEQ ID NO: 135) modestly increased the lifetime of the IL-2 fusion protein, as compared to the IL-2 fusion protein comprising the same mutations in the IL-2 moiety but no additional mutation in the Fc sequence (SEQ ID NO: 1007).

### Example 11: IL-2-Fc Fusion Protein Selectively Expands T Regulatory Cells In Vivo in Cynomolgus Monkeys

[0904] The pharmacokinetic and pharmacodynamic profile of an exemplary IL-2-Fc fusion protein, i.e., the IL-2-Fc fusion protein comprising the mutations H16L/V69A/Q74P/C125S (SEQ ID NO:1008) (IL2-118 fused to IgG1 Fc N297G allotype m3), and its effect on the expansion and proliferation of immune cells were investigated in vivo in cynomolgus monkeys. Monkeys were subcutaneously administered 100 μg/kg of the IL-2-Fc fusion protein or a placebo (phosphate-buffered saline) once weekly (day 1, 8, 15, and 22) for four weeks. The four weekly dosing was followed by a four-week recovery period.

[0905] The exemplary IL-2-Fc fusion protein was well tolerated in all monkeys, with no clinical signs or observations observed during the 4-week dosing or the 4-week recovery periods. With respect to the pharmacokinetics of the IL-2-Fc fusion protein, the data demonstrate a rapid initial absorption phase (Tmax<24 hours for all animals), followed by an elimination phase (half-life (t_{1/2}) was approximately 10 hours) (FIG. 20). Serum levels of the IL-2-Fc fusion protein in the monkeys over time is summarized in FIG. 20.

[0906] The effects of the exemplary IL-2-Fc fusion protein on immune cell expansion following administration in monkeys was also investigated. Flow cytometry was used for the quantification of circulating immune cell subsets following treatment with the IL-2-Fc fusion protein or the placebo control. Table 13 lists the intracellular and cell surface markers and corresponding cell populations that were analyzed. As shown in FIG. 21A, the IL-2-Fc fusion protein significantly increased the amount of T regulatory cells in monkeys as compared to the placebo control. Further, as shown in FIG. 21B, up to 80% of the regulatory T cells stained positive for Ki67 (a marker for cell proliferation) in monkeys that received the IL-2-Fc fusion protein. Taken together, these data indicate that regulatory T cells were hyperproliferative and showed increased expansion in response to the IL-2-Fc fusion protein.

[0907] As shown in FIGS. 22A-22D, the IL-2-Fc fusion protein did not result in an increase in the expansion of NK cells (FIG. 22A), cytotoxic T cells (FIG. 22B), helper T cells (FIG. 22C), or total T cells (FIG. 22D).

[0908] In summary, these data indicate that IL2-118 fused to IgG1 Fc N297G allotype m3 was able to selectively expand regulatory T cells in vivo.

TABLE 13
List of intracellular and cell surface markers and corresponding cellular
populations for flow cytometric analysis of circulating immune cells
Immunophenotyping Antigens and Cell Populations

| Antigen Marker | Cell Population Identified |
|---|---|
| CD45+/CD3+/CD20−/CD159a− | Total T-lymphocytes |
| CD45+/CD3+/CD20−/ | T-helper lymphocytes |
| CD159a−/CD4+/CD8− | |
| CD45+/CD3+/CD20−/CD159a−/ | T-cytotoxic lymphocytes |
| CD4−/CD8+ | |
| CD45+/CD3−/CD20−/CD159a+ | CD159a+ Natural-killer cells |
| CD3+/CD159a−/CD4+/CD8−/ | Regulatory T-helper-lymphocytes |
| CD25+/ FoxP3+ | |
| CD3+/CD159a−/CD4+/CD8−/ | Proliferating Regulatory T- |
| CD25+/FoxP3+/Ki67+ | helper-lymphocytes |

### Example 12: IL-2-Fc Fusion Protein Reduces Kidney Damage in a Mouse Model of Lupus Nephritis

[0909] The MRL/MpJ-Faslpr/J strain of mice (Jackson Labs, Bar Harbor Me., stock #000485) are homozygous for mutation in the Fas gene, leading to systemic autoimmunity that resembles human systemic lupus erythematosus (SLE) with kidney involvement similar to human lupus nephritis. These mice were used to investigate the ability of IL-2-Fc fusion proteins to induce T regulatory cell expansion by measuring impact on disease progression in this model of SLE.

[0910] Groups of up to 30 mice were treated subcutaneously with PBS vehicle control, or an exemplary IL-2-Fc fusion protein described herein at 40 μg/kg, every 3 days. Treatment began at 11 weeks of age and continued until the end of the study when mice were 18 weeks old. Disease scoring included proteinuria as measured weekly in all mice, analysis of glomerular lesions by kidney histology as measured at the end of the study, blood urea nitrogen (BUN) as measured at the end of the study, and quantitative measurement of antibodies in serum recognizing double stranded DNA (anti-dsDNA antibodies).

[0911] FIG. 23A shows average proteinuria in the two groups throughout the course of the study. Early in the study the treated group showed lower average proteinuria, with greatest statistical significance when the mice were 12 weeks old (p=0.004 using two-tailed unpaired t-test) and 13 weeks old (p=0.056) (FIG. 23B, center and right panel).

[0912] Kidney histology was also performed at the end of the study to evaluate glomerular lesions, which are indicative of kidney damage. An analysis protocol was used with analysts blinded to the treatment groups. The average number of lesions identified in untreated mice was 6.72 while the average in treated mice was 5.167 (FIG. 23C). This result was statistically significant with p<0.005 (two-tailed unpaired t-test), indicating that the treated group had accumulated less kidney damage over the course of the study. No difference was observed in anti-dsDNA antibodies or BUN.

[0913] In summary, these data indicate that the exemplary IL-2-Fc fusion protein impacts disease progression in a murine model of lupus nephritis.

### Example 13: IL-2-Fc Fusion Protein Induces p-STAT5 Signaling in T-Regulatory Cells from Healthy and Disease Donors

[0914] PBMCs were isolated from healthy subjects and subjects having lupus nephritis or psoriasis. These cells were incubated with an exemplary IL-2 fusion protein, the IL-2-Fc fusion protein comprising the mutations H16L/V69A/Q74P/C125S (SEQ ID NO:1008) (IL2-118 fused to IgG1 Fc N297G allotype m3), for 30 minutes and downstream phosphoro-STAT5 signaling was measured in order to assess the activity of exemplary IL-2 fusion protein in the relevant cell types, including, T reg cells, NK cells, and cytotoxic T cells. p-STAT5 is produced as a direct result of IL-2 signaling by receptors on the cell surface, making it a suitable marker for IL-2 signaling. To measure p-STAT5 signaling, after treatment, the cells were fixed and stained with fluorescent antibodies that recognize markers of cell identity for T regs, NK cells, and cytotoxic T cells. The cells were also stained with an antibody (Cell Signaling Technology Cat #9365 and #14603) that binds to the transcription factor STAT5 phosphorylated at tyrosine 647 (p-STAT5). Flow cytometry was then used to measure markers of cell identity (FIG. 24A-24C), along with their level of p-STAT5.

[0915] The exemplary IL-2 fusion protein was shown to induce similarly robust p-STAT5 signaling in T regs from healthy vs. disease subjects (e.g., subjects having lupus nephritis or psoriasis) (FIG. 24A). Additionally, very little IL-2 fusion protein-induced p-STAT5 signaling was detected in NK cells (FIG. 24B) or cytotoxic T cells (FIG. 24C), confirming the specificity of the exemplary IL-2 fusion protein for T regs.

### INCORPORATION BY REFERENCE

[0916] All publications, patents, and Accession numbers mentioned herein are hereby incorporated by reference in their entirety as if each individual publication or patent was specifically and individually indicated to be incorporated by reference.

### EQUIVALENTS

[0917] While specific embodiments of the subject invention have been discussed, the above specification is illustrative and not restrictive. Many variations of the invention will become apparent to those skilled in the art upon review of this specification and the claims below. The full scope of the invention should be determined by reference to the claims, along with their full scope of equivalents, and the specification, along with such variations.

Lengthy table referenced here
US20220226442A1-20220721-T00001
Please refer to the end of the specification for access instructions.

Lengthy table referenced here
US20220226442A1-20220721-T00002
Please refer to the end of the specification for access instructions.

LENGTHY TABLES
The patent application contains a lengthy table section. A copy of the table is available in electronic form from the USPTO web site (https://seqdata.uspto.gov/?pageRequest=docDetail&DocID=US20220226442A1). An electronic copy of the table will also be available from the USPTO upon request and payment of the fee set forth in 37 CFR 1.19(b)(3).

1. A method of selectively increasing p-STAT5 signaling, comprising:
administering to a subject in need thereof an effective amount of an IL-2 agent,
wherein the level of p-STAT5 signaling in a Treg cell from the subject is increased and the level of p-STAT5 signaling in a NK cell and/or a cytotoxic T cell from the subject is not substantially increased,
wherein the IL-2 agent is an IL-2 variant or an IL-2 fusion protein comprising the IL-2 variant, and wherein the IL-2 variant comprises:
(i) the amino acid substitution H16L or H16N, and/or the amino acid substitution I92S; and
(ii) the amino acid substitutions V69A, Q74P, and C125S,
corresponding to human IL-2 (SEQ ID NO: 1031),
thereby selectively increasing p-STAT5 signaling.

2. The method of claim 1, wherein the level of p-STAT5 signaling in the Treg cell is increased by at least 2, 3, 4, 5, 6, 7, 8, 9, or 10 fold, and/or wherein the level of p-STAT signaling in the NK cell and/or cytotoxic T cell is increased by no more than 50%, 40%, 30%, 20%, or 10%.

3. The method of claim 1, wherein the disorder is, or the subject has, lupus nephritis or psoriasis.

4. The method of claim 1, wherein the disorder is, or the subject has, an autoimmune disorder.

5. The method of claim 1, wherein the disorder is, or the subject has, systemic lupus erythematosus (SLE), autoimmune hepatitis (AIH), immune-related focal segmented glomerulosclerosis (IM-FSGS), or alopecia areata (AA)

6. The method of claim 1, further comprising determining the level of p-STAT5 signaling in an immune cell, or in a T reg cell, an NK cell, and/or a cytotoxic T cell, from the subject.

7. The method of claim 6, wherein the determining step is performed prior to, during, and/or subsequent to the administering step, and/or wherein the level of p-STAT5 signaling is determined using a flow cytometry-based p-STAT5 assay, e.g., as described in Example 13.

8. The method of claim 1, further comprising isolating a blood cell or a PBMC from the subject.

9. The method of claim 1, wherein the IL-2 variant further comprises the amino acid substitution T3A.

10. The method of claim 1, wherein the IL-2 variant comprises the amino acid sequence of any of SEQ ID NOs: 4, 5, 11, 1000, 1001, or 1002, an amino acid sequence that is at least 95% identical thereto or differs by no more than 1, 2, 3, 4, or 5 amino acids therefrom, or a functional fragment thereof.

11. The method of claim 1, wherein the IL-2 agent comprises an IL-2 fusion protein comprising the IL-2 variant.

12. The method of claim 9, wherein the IL-2 fusion protein further comprises an Fc region.

13. The method of claim 12, wherein the Fc region:
(a) comprises an Fc region of IgG1 allotype m3 comprising an N297G substitution according to EU numbering;
(b) comprises the amino acid sequence of SEQ ID NO: 1003, or an amino acid sequence that is at least 95% identical thereto or differs by no more than 1, 2, 3, 4, 5, 6, 7, 8, 9, or 10 amino acids therefrom, or a functional fragment thereof; and/or
(c) is fused to the C-terminus of the IL-2 variant.

14. The method of claim 11, wherein the IL-2 fusion protein further comprises a linker or a linker comprising (G₄S)₄ (SEQ ID NO: 48).

15. The method of claim 11, wherein the IL-2 fusion protein forms a dimer.

16. The method of claim 11, wherein the IL-2 fusion protein comprises an amino acid sequence of any of SEQ ID NOs: 1004, 1005, 1006, 1007, 1008, or 1009, an amino acid sequence that is at least 95% identical thereto or differs by no more than 1, 2, 3, 4, 5, 6, 7, 8, 9, or 10 amino acids therefrom, or a functional fragment thereof.

17. A method of increasing p-STAT5 signaling, comprising:
contacting a Treg cell from a subject having a disorder with an IL-2 agent in an amount sufficient to increase the level of p-STAT5 signaling in the Treg cell, compared to a reference level of p-STAT5 signaling,
wherein the reference level is the level of p-STAT5 signaling in a Treg cell from a subject who does not have the disorder, and wherein the Treg cell from the subject who does not have the disorder has been contacted with the same amount of the IL-2 agent, and
wherein the IL-2 agent is an IL-2 variant or an IL-2 fusion protein comprising the IL-2 variant, and wherein the IL-2 variant comprises:
(i) the amino acid substitution H16L or H16N, and/or the amino acid substitution I92S; and
(ii) the amino acid substitutions V69A, Q74P, and C125S,
corresponding to human IL-2 (SEQ ID NO: 1031),
thereby increasing p-STAT5 signaling.

18. A method of treating a disorder, comprising:
administering to a subject in need thereof an effective amount of an IL-2 agent,
wherein the level of phosphor-STAT5 (p-STAT5) signaling in a Treg cell from the subject is increased, wherein the IL-2 agent is an IL-2 variant or an IL-2 fusion protein comprising the IL-2 variant, and wherein the IL-2 variant comprises:
(i) the amino acid substitution H16L or H16N, and/or the amino acid substitution I92S; and
(ii) the amino acid substitutions V69A, Q74P, and C125S,
corresponding to human IL-2 (SEQ ID NO: 1031),
thereby treating the disorder.

19. The method of claim 18, wherein the level of p-STAT5 signaling in a NK cell and/or a cytotoxic T cell from the subject in not substantially increased.

20. A method of treating immune-related focal segmented glomerulosclerosis (IM-FSGS), comprising:
administering to a subject in need thereof an effective amount of an IL-2 agent,
wherein the level of phosphor-STAT5 (p-STAT5) signaling in a Treg cell from the subject is increased, wherein the IL-2 agent is an IL-2 variant or an IL-2 fusion protein comprising the IL-2 variant, and wherein the IL-2 variant comprises:
(i) the amino acid substitution H16L or H16N, and/or the amino acid substitution I92S; and
(ii) the amino acid substitutions V69A, Q74P, and C125S,
corresponding to human IL-2 (SEQ ID NO: 1031),
thereby treating IM-FSGS.

The application's sequence listing, which the Patent Office published only in electronic form, follows.

SEQUENCE LISTING (1032 sequences)

SEQ ID NO: 1 - protein, 133 aa, Artificial Sequence
  source: /note="Description of Artificial Sequence: Synthetic polypeptide"
APTSSSTKKTQLQLEHLLLDLQMILNGINNYKNPKLTRMLTFKFYMPKKATELKHLQCLEEELKPLEEVLNLAQSKNFHLRPRDLISNINVIVLELKGSETTFMCEYADETATIVEFLNRWITFSQSIISTLT

SEQ ID NO: 2 - protein, 133 aa, Artificial Sequence [sequence omitted]

SEQ ID NO: 3 - protein, 133 aa, Artificial Sequence
  source: /note="Description of Artificial Sequence: Synthetic polypeptide"
APTSSSTKKTQLQLEDLLLDLQMILNGINNYKNPKLTRMLTFKFYMPKKATELKHLQCLEEELKPLEEALNLAPSKNFHLRPRDLISNINVIVLELKGSETTFMCEYADETATIVEFLNRWITFSQSIISTLT

SEQ ID NO: 4 - protein, 133 aa, Artificial Sequence
  source: /note="Description of Artificial Sequence: Synthetic polypeptide"
APTSSSTKKTQLQLENLLLDLQMILNGINNYKNPKLTRMLTFKFYMPKKATELKHLQCLEEELKPLEEALNLAPSKNFHLRPRDLISNINVIVLELKGSETTFMCEYADETATIVEFLNRWITFSQSIISTLT

SEQ ID NO: 5 - protein, 133 aa, Artificial Sequence
  source: /note="Description of Artificial Sequence: Synthetic polypeptide"
APTSSSTKKTQLQLELLLLDLQMILNGINNYKNPKLTRMLTFKFYMPKKATELKHLQCLEEELKPLEEALNLAPSKNFHLRPRDLISNINVIVLELKGSETTFMCEYADETATIVEFLNRWITFSQSIISTLT

SEQ ID NO: 6 - protein, 133 aa, Artificial Sequence
  source: /note="Description of Artificial Sequence: Synthetic polypeptide"
APTSSSTKKTQLQLEHLLLDLQMILNGTNNYKNPKLTRMLTFKFYMPKKATELKHLQCLEEELKPLEEALNLAPSKNFHLRPRDLISNINVIVLELKGSETTFMCEYADETATIVEFLNRWITFSQSIISTLT

SEQ ID NO: 7 - protein, 133 aa, Artificial Sequence
  source: /note="Description of Artificial Sequence: Synthetic polypeptide"
APTSSSTKKTQLQLEHLLLDLQMILNGINNYKNPKLTRMLTFKFYMPKKATELKHLQCLEEELKPLEEALNLAPSKNFHLRPRVLISNINVIVLELKGSETTFMCEYADETATIVEFLNRWITFSQSIISTLT

SEQ ID NO: 8 - protein, 133 aa, Artificial Sequence
  source: /note="Description of Artificial Sequence: Synthetic polypeptide"
APTSSSTKKTQLQLEHLLLDLQMILNGINNYKNPKLTRMLTFKFYMPKKATELKHLQCLEEELKPLEEALNLAPSKNFHLRPRDLIRNINVIVLELKGSETTFMCEYADETATIVEFLNRWITFSQSIISTLT

SEQ ID NO: 9 - protein, 133 aa, Artificial Sequence
  source: /note="Description of Artificial Sequence: Synthetic polypeptide"
APTSSSTKKTQLQLEHLLLDLQMILNGINNYKNPKLTRMLTFKFYMPKKATELKHLQCLEEELKPLEEALNLAPSKNFHLRPRDLISLINVIVLELKGSETTFMCEYADETATIVEFLNRWITFSQSIISTLT

SEQ ID NO: 10 - protein, 133 aa, Artificial Sequence
  source: /note="Description of Artificial Sequence: Synthetic polypeptide"
APTSSSTKKTQLQLEHLLLDLQMILNGINNYKNPKLTRMLTFKFYMPKKATELKHLQCLEEELKPLEEALNLAPSKNFHLRPRDLISSINVIVLELKGSETTFMCEYADETATIVEFLNRWITFSQSIISTLT

SEQ ID NO: 11 - protein, 133 aa, Artificial Sequence
  source: /note="Description of Artificial Sequence: Synthetic polypeptide"
APTSSSTKKTQLQLEHLLLDLQMILNGINNYKNPKLTRMLTFKFYMPKKATELKHLQCLEEELKPLEEALNLAPSKNFHLRPRDLISNINVSVLELKGSETTFMCEYADETATIVEFLNRWITFSQSIISTLT

SEQ ID NO: 12 - protein, 133 aa, Artificial Sequence
  source: /note="Description of Artificial Sequence: Synthetic polypeptide"
APTSSSTKKTQLQLEHLLLDLQMILNGINNYKNPELTRMLTFKFYMPKKATELKHLQCLEEELKPLEEALNLAPSKNFHLRPRDLISNINVIVLELKGSETTFMCEYADETATIVEFLNRWITFSQSIISTLT

SEQ ID NO: 13 - protein, 133 aa, Artificial Sequence
  source: /note="Description of Artificial Sequence: Synthetic polypeptide"
APTSSSTKKTQLQLENLLLDLQMILNGINNYKNPELTRMLTFKFYMPKKATELKHLQCLEEELKPLEEALNLAPSKNFHLRPRDLISNINVIVLELKGSETTFMCEYADETATIVEFLNRWITFSQSIISTLT

SEQ ID NO: 14 - protein, 133 aa, Artificial Sequence
  source: /note="Description of Artificial Sequence: Synthetic polypeptide"
APTSSSTKKTQLQLELLLLDLQMILNGINNYKNPELTRMLTFKFYMPKKATELKHLQCLEEELKPLEEALNLAPSKNFHLRPRDLISNINVIVLELKGSETTFMCEYADETATIVEFLNRWITFSQSIISTLT

SEQ ID NO: 15 - protein, 133 aa, Artificial Sequence
  source: /note="Description of Artificial Sequence: Synthetic polypeptide"
APTSSSTKKTQLQLEHLLLDLQMILNGINNYKNPELTRMLTFKFYMPKKATELKHLQCLEEELKPLEEALNLAPSKNFHLRPRVLISNINVIVLELKGSETTFMCEYADETATIVEFLNRWITFSQSIISTLT

SEQ ID NO: 16 - protein, 133 aa, Artificial Sequence
  source: /note="Description of Artificial Sequence: Synthetic polypeptide"
APTSSSTKKTQLQLEHLLLDLQMILNGINNYKNPELTRMLTFKFYMPKKATELKHLQCLEEELKPLEEALNLAPSKNFHLRPRDLISNINVSVLELKGSETTFMCEYADETATIVEFLNRWITFSQSIISTLT

SEQ ID NO: 17 - protein, 133 aa, Artificial Sequence
  source: /note="Description of Artificial Sequence: Synthetic polypeptide"
APTSSSTKKTQLQLEHLLLDLQMILNGINNYKNPKLTQMLTFKFYMPKKATELKHLQCLEEELKPLEEALNLAPSKNFHLRPRDLISNINVIVLELKGSETTFMCEYADETATIVEFLNRWITFSQSIISTLT

SEQ ID NO: 18 - protein, 133 aa, Artificial Sequence
  source: /note="Description of Artificial Sequence: Synthetic polypeptide"
APTSSSTKKTQLQLENLLLDLQMILNGINNYKNPKLTQMLTFKFYMPKKATELKHLQCLEEELKPLEEALNLAPSKNFHLRPRDLISNINVIVLELKGSETTFMCEYADETATIVEFLNRWITFSQSIISTLT

SEQ ID NO: 19 - protein, 133 aa, Artificial Sequence
  source: /note="Description of Artificial Sequence: Synthetic polypeptide"
APTSSSTKKTQLQLELLLLDLQMILNGINNYKNPKLTQMLTFKFYMPKKATELKHLQCLEEELKPLEEALNLAPSKNFHLRPRDLISNINVIVLELKGSETTFMCEYADETATIVEFLNRWITFSQSIISTLT

SEQ ID NO: 20 - protein, 133 aa, Artificial Sequence
  source: /note="Description of Artificial Sequence: Synthetic polypeptide"
APTSSSTKKTQLQLEHLLLDLQMILNGINNYKNPKLTQMLTFKFYMPKKATELKHLQCLEEELKPLEEALNLAPSKNFHLRPRVLISNINVIVLELKGSETTFMCEYADETATIVEFLNRWITFSQSIISTLT

SEQ ID NO: 21 - protein, 133 aa, Artificial Sequence
  source: /note="Description of Artificial Sequence: Synthetic polypeptide"
APTSSSTKKTQLQLEHLLLDLQMILNGINNYKNPKLTQMLTFKFYMPKKATELKHLQCLEEELKPLEEALNLAPSKNFHLRPRDLISNINVSVLELKGSETTFMCEYADETATIVEFLNRWITFSQSIISTLT

SEQ ID NO: 22 - protein, 133 aa, Artificial Sequence
  source: /note="Description of Artificial Sequence: Synthetic polypeptide"
APTSSSTKKTQLQLEHLLLDLQMILNGINNYKNPKLTNMLTFKFYMPKKATELKHLQCLEEELKPLEEALNLAPSKNFHLRPRDLISNINVIVLELKGSETTFMCEYADETATIVEFLNRWITFSQSIISTLT

SEQ ID NO: 23 - protein, 133 aa, Artificial Sequence
  source: /note="Description of Artificial Sequence: Synthetic polypeptide"
APTSSSTKKTQLQLENLLLDLQMILNGINNYKNPKLTNMLTFKFYMPKKATELKHLQCLEEELKPLEEALNLAPSKNFHLRPRDLISNINVIVLELKGSETTFMCEYADETATIVEFLNRWITFSQSIISTLT

SEQ ID NO: 24 - protein, 133 aa, Artificial Sequence
  source: /note="Description of Artificial Sequence: Synthetic polypeptide"
APTSSSTKKTQLQLELLLLDLQMILNGINNYKNPKLTNMLTFKFYMPKKATELKHLQCLEEELKPLEEALNLAPSKNFHLRPRDLISNINVIVLELKGSETTFMCEYADETATIVEFLNRWITFSQSIISTLT

SEQ ID NO: 25 - protein, 133 aa, Artificial Sequence
  source: /note="Description of Artificial Sequence: Synthetic polypeptide"
APTSSSTKKTQLQLEHLLLDLQMILNGINNYKNPKLTNMLTFKFYMPKKATELKHLQCLEEELKPLEEALNLAPSKNFHLRPRVLISNINVIVLELKGSETTFMCEYADETATIVEFLNRWITFSQSIISTLT

SEQ ID NO: 26 - protein, 133 aa, Artificial Sequence
  source: /note="Description of Artificial Sequence: Synthetic polypeptide"
APTSSSTKKTQLQLEHLLLDLQMILNGINNYKNPKLTNMLTFKFYMPKKATELKHLQCLEEELKPLEEALNLAPSKNFHLRPRDLISNINVSVLELKGSETTFMCEYADETATIVEFLNRWITFSQSIISTLT

SEQ ID NO: 27 - protein, 133 aa, Artificial Sequence
  source: /note="Description of Artificial Sequence: Synthetic polypeptide"
APTSSSTKKTQLQLEHLLLDLQMILNGINNYKNPKLTEMLTFKFYMPKKATELKHLQCLEEELKPLEEALNLAPSKNFHLRPRDLISNINVIVLELKGSETTFMCEYADETATIVEFLNRWITFSQSIISTLT

SEQ ID NO: 28 - protein, 133 aa, Artificial Sequence
  source: /note="Description of Artificial Sequence: Synthetic polypeptide"
APTSSSTKKTQLQLEHLLLDLQMILNGINNYKNPKLTRMLTKKFYMPKKATELKHLQCLEEELKPLEEALNLAPSKNFHLRPRDLISNINVIVLELKGSETTFMCEYADETATIVEFLNRWITFSQSIISTLT

SEQ ID NO: 29 - protein, 133 aa, Artificial Sequence
  source: /note="Description of Artificial Sequence: Synthetic polypeptide"
APTSSSTKKTQLQLEHLLLDLQMILNGINNYKNPKLTRMLTQKFYMPKKATELKHLQCLEEELKPLEEALNLAPSKNFHLRPRDLISNINVIVLELKGSETTFMCEYADETATIVEFLNRWITFSQSIISTLT

SEQ ID NO: 30 - protein, 133 aa, Artificial Sequence
  source: /note="Description of Artificial Sequence: Synthetic polypeptide"
APTSSSTKKTQLQLEHLLLDLQMILNGINNYKNPKLTRMLTAKFAMPKKATELKHLQCLEEELKPLEEALNGAPSKNFHLRPRDLISDINVIVLELKGSETTFMCEYADETATIVEFLNRWITFSQSIISTLT

SEQ ID NO: 31 - protein, 133 aa, Artificial Sequence
  source: /note="Description of Artificial Sequence: Synthetic polypeptide"
APTSSSTKKTQLQLEHLLLDLQMILNGINNYKNPKLTNMLTFKFYMPKKATELKHLQCLEEELKPLEEALNLAPSKNFHLRPRDLIRNINVIVLELKGSETTFMCEYADETATIVEFLNRWITFSQSIISTLT

SEQ ID NO: 32 - protein, 133 aa, Artificial Sequence
  source: /note="Description of Artificial Sequence: Synthetic polypeptide"
APTSSSTKKTQLQLENLLLDLQMILNGINNYKNPKLTEMLTFKFYMPKKATELKHLQCLEEELKPLEEALNLAPSKNFHLRPRDLISNINVIVLELKGSETTFMCEYADETATIVEFLNRWITFSQSIISTLT

SEQ ID NO: 33 - protein, 133 aa, Artificial Sequence
  source: /note="Description of Artificial Sequence: Synthetic polypeptide"
APTSSSTKKTQLQLEHLLLDLQMILNGINNYKNPKLTEMLTFKFYMPKKATELKHLQCLEEELKPLEEALNLAPSKNFHLRPRVLISNINVIVLELKGSETTFMCEYADETATIVEFLNRWITFSQSIISTLT

SEQ ID NO: 34 - protein, 133 aa, Artificial Sequence
  source: /note="Description of Artificial Sequence: Synthetic polypeptide"
APTSSSTKKTQLQLEHLLLDLQMILNGINNYKNPKLTEMLTFKFYMPKKATELKHLQCLEEELKPLEEALNLAPSKNFHLRPRDLIRNINVIVLELKGSETTFMCEYADETATIVEFLNRWITFSQSIISTLT

SEQ ID NO: 35 - protein, 133 aa, Artificial Sequence
  source: /note="Description of Artificial Sequence: Synthetic polypeptide"
APTSSSTKKTQLQLEHLLLDLQMILNGINNYKNPKLTEMLTFKFYMPKKATELKHLQCLEEELKPLEEALNLAPSKNFHLRPRDLISNINVSVLELKGSETTFMCEYADETATIVEFLNRWITFSQSIISTLT

SEQ ID NO: 36 - protein, 133 aa, Artificial Sequence
  source: /note="Description of Artificial Sequence: Synthetic polypeptide"
APTSSSTKKTQLQLENLLLDLQMILNGINNYKNPKLTRMLTQKFYMPKKATELKHLQCLEEELKPLEEALNLAPSKNFHLRPRDLISNINVIVLELKGSETTFMCEYADETATIVEFLNRWITFSQSIISTLT

SEQ ID NO: 37 - protein, 133 aa, Artificial Sequence
  source: /note="Description of Artificial Sequence: Synthetic polypeptide"
APTSSSTKKTQLQLEHLLLDLQMILNGINNYKNPKLTRMLTQKFYMPKKATELKHLQCLEEELKPLEEALNLAPSKNFHLRPRDLISNINVSVLELKGSETTFMCEYADETATIVEFLNRWITFSQSIISTLT

SEQ ID NO: 38 - protein, 133 aa, Artificial Sequence
  source: /note="Description of Artificial Sequence: Synthetic polypeptide"
APTSSSTKKTQLQLENLLLDLQMILNGINNYKNPELTNMLTFKFYMPKKATELKHLQCLEEELKPLEEALNLAPSKNFHLRPRDLISNINVIVLELKGSETTFMCEYADETATIVEFLNRWITFSQSIISTLT

SEQ ID NO: 39 - protein, 227 aa, Homo sapiens
DKTHTCPPCPAPELLGGPSVFLFPPKPKDTLMISRTPEVTCVVVDVSHEDPEVKFNWYVDGVEVHNAKTKPREEQYNSTYRVVSVLTVLHQDWLNGKEYKCKVSNKALPAPIEKTISKAKGQPREPQVYTLPPSRDELTKNQVSLTCLVKGFYPSDIAVEWESNGQPENNYKTTPPVLDSDGSFFLYSKLTVDKSRWQQGNVFSCSVMHEALHNHYTQKSLSLSPGK

SEQ ID NO: 40 - protein, 227 aa, Artificial Sequence
  source: /note="Description of Artificial Sequence: Synthetic polypeptide"
DKTHTCPPCPAPELLGGPSVFLFPPKPKDTLMISRTPEVTCVVVDVSHEDPEVKFNWYVDGVEVHNAKTKPREEQYGSTYRVVSVLTVLHQDWLNGKEYKCKVSNKALPAPIEKTISKAKGQPREPQVYTLPPSRDELTKNQVSLTCLVKGFYPSDIAVEWESNGQPENNYKTTPPVLDSDGSFFLYSKLTVDKSRWQQGNVFSCSVMHEALHNHYTQKSLSLSPGK

SEQ ID NO: 41 - protein, 227 aa, Artificial Sequence
  source: /note="Description of Artificial Sequence: Synthetic polypeptide"
DKTHTCPPCPAPEAAGGPSVFLFPPKPKDTLMISRTPEVTCVVVDVSHEDPEVKFNWYVDGVEVHNAKTKPREEQYNSTYRVVSVLTVLHQDWLNGKEYKCKVSNKALGAPIEKTISKAKGQPREPQVYTLPPSRDELTKNQVSLTCLVKGFYPSDIAVEWESNGQPENNYKTTPPVLDSDGSFFLYSKLTVDKSRWQQGNVFSCSVMHEALHNHYTQKSLSLSPGK

SEQ ID NO: 42 - protein, 227 aa, Artificial Sequence
  source: /note="Description of Artificial Sequence: Synthetic polypeptide"
DKTHTCPPCPAPELLGGPSVFLFPPKPKDTLMISRTPEVTCVVVDVSHEDPEVKFNWYVDGVEVHNAKTKPREEQYGSTYRVVSVLQVLHVDWLNGKEYKCKVSNKALPAPIEKTISKAKGQPREPQVYTLPPSRDELTKNQVSLTCLVKGFYPSDIVVEWESNGQPENNYKTTPPVLDSDGSFFLYSKLTVDKSRWQQGNVFSCSVMHEALHNHYTQKSLSLSPGK

SEQ ID NO: 43 - protein, 227 aa, Artificial Sequence
  source: /note="Description of Artificial Sequence: Synthetic polypeptide"
DKTHTCPPCPAPEAAGGPSVFLFPPKPKDTLMISRTPEVTCVVVDVSHEDPEVKFNWYVDGVEVHNAKTKPREEQYNSTYRVVSVLQVLHVDWLNGKEYKCKVSNKALGAPIEKTISKAKGQPREPQVYTLPPSRDELTKNQVSLTCLVKGFYPSDIVVEWESNGQPENNYKTTPPVLDSDGSFFLYSKLTVDKSRWQQGNVFSCSVMHEALHNHYTQKSLSLSPGK

SEQ ID NO: 44 - protein, 229 aa, Artificial Sequence
  source: /note="Description of Artificial Sequence: Synthetic polypeptide"
ESKYGPPCPPCPAPEFLGGPSVFLFPPKPKDTLMISRTPEVTCVVVDVSQEDPEVQFNWYVDGVEVHNAKTKPREEQFNSTYRVVSVLTVLHQDWLNGKEYKCKVSNKGLPSSIEKTISKAKGQPREPQVYTLPPSQEEMTKNQVSLTCLVKGFYPSDIAVEWESNGQPENNYKTTPPVLDSDGSFFLYSRLTVDKSRWQEGNVFSCSVMHEALHNHYTQKSLSLSLGK

SEQ ID NO: 45 - protein, 229 aa, Artificial Sequence
  source: /note="Description of Artificial Sequence: Synthetic polypeptide"
ESKYGPPCPPCPAPEFLGGPSVFLFPPKPKDTLMISRTPEVTCVVVDVSQEDPEVQFNWYVDGVEVHNAKTKPREEQFNSTYRVVSVLTVLHQDWLNGKEYKCKVSNKGLPSSIEKTISKAKGQPREPQVYTLPPSQEEMTKNQVSLTCLVKGFYPSDIAVEWESNGQPENNYKTTPPVLDSDGSFFLYSKLTVDKSRWQEGNVFSCSVMHEALHNHYTQKSLSLSLGK

SEQ ID NO: 46 - protein, 229 aa, Artificial Sequence
  source: /note="Description of Artificial Sequence: Synthetic polypeptide"
ESKYGPPCPPCPAPEFLGGPSVFLFPPKPKDTLMISRTPEVTCVVVDVSQEDPEVQFNWYVDGVEVHNAKTKPREEQFNSTYRVVSVLQVLHVDWLNGKEYKCKVSNKGLPSSIEKTISKAKGQPREPQVYTLPPSQEEMTKNQVSLTCLVKGFYPSDIVVEWESNGQPENNYKTTPPVLDSDGSFFLYSRLTVDKSRWQEGNVFSCSVMHEALHNHYTQKSLSLSLGK

SEQ ID NO: 47 - protein, 229 aa, Artificial Sequence
  source: /note="Description of Artificial Sequence: Synthetic polypeptide"
ESKYGPPCPPCPAPEFLGGPSVFLFPPKPKDTLMISRTPEVTCVVVDVSQEDPEVQFNWYVDGVEVHNAKTKPREEQFNSTYRVVSVLQVLHVDWLNGKEYKCKVSNKGLPSSIEKTISKAKGQPREPQVYTLPPSQEEMTKNQVSLTCLVKGFYPSDIVVEWESNGQPENNYKTTPPVLDSDGSFFLYSKLTVDKSRWQEGNVFSCSVMHEALHNHYTQKSLSLSLGK

SEQ ID NO: 48 - protein, 20 aa, Artificial Sequence
  source: /note="Description of Artificial Sequence: Synthetic peptide"
GGGGSGGGGSGGGGSGGGGS

SEQ ID NO: 49 - protein, 36 aa, Artificial Sequence
  source: /note="Description of Artificial Sequence: Synthetic polypeptide"
AGSGGSGGSGGSPVPSTPPTNSSSTPPTPSPSASGS

SEQ ID NO: 50 - protein, 44 aa, Artificial Sequence
  source: /note="Description of Artificial Sequence: Synthetic polypeptide"
AGSGGSGGSGGSPVPSTPPTPSPSTPPTPSPSGGSGNSSGSGGS

SEQ ID NO: 51 - protein, 48 aa, Artificial Sequence
  source: /note="Description of Artificial Sequence: Synthetic polypeptide"
AGSGNSSGSGGSGGSGNSSGSGGSPVPSTPPTPSPSTPPTPSPSASGS

SEQ ID NO: 52 - protein, 24 aa, Artificial Sequence
  source: /note="Description of Artificial Sequence: Synthetic peptide"
AEAAAKEAAAKEAAAKEAAAKAGS

SEQ ID NO: 53 - protein, 25 aa, Artificial Sequence
  source: /note="Description of Artificial Sequence: Synthetic peptide"
GTTPNPPASSSTTGSSTPTNPPAGS

SEQ ID NO: 54 - protein, 37 aa, Artificial Sequence
  source: /note="Description of Artificial Sequence: Synthetic polypeptide"
AGSPGAGNGGNNGGNPPPPTTTTSSAPATTTTASAGS

SEQ ID NO: 55 - protein, 22 aa, Artificial Sequence
  source: /note="Description of Artificial Sequence: Synthetic peptide"
GGGSAGGGSAGGGSAGGGSAGS

SEQ ID NO: 56 - protein, 380 aa, Artificial Sequence
  source: /note="Description of Artificial Sequence: Synthetic polypeptide"
APTSSSTKKTQLQLEHLLLDLQMILNGINNYKNPKLTRMLTFKFYMPKKATELKHLQCLEEELKPLEEVLNLAQSKNFHLRPRDLISNINVIVLELKGSETTFMCEYADETATIVEFLNRWITFSQSIISTLTGGGGSGGGGSGGGGSGGGGSDKTHTCPPCPAPELLGGPSVFLFPPKPKDTLMISRTPEVTCVVVDVSHEDPEVKFNWYVDGVEVHNAKTKPREEQYGSTYRVVSVLTVLHQDWLNGKEYKCKVSNKALPAPIEKTISKAKGQPREPQVYTLPPSRDELTKNQVSLTCLVKGFYPSDIAVEWESNGQPENNYKTTPPVLDSDGSFFLYSKLTVDKSRWQQGNVFSCSVMHEALHNHYTQKSLSLSPGK

SEQ ID NO: 57 - protein, 380 aa, Artificial Sequence
  source: /note="Description of Artificial Sequence: Synthetic polypeptide"
APTSSSTKKTQLQLEHLLLDLQMILNGINNYKNPKLTRMLTFKFYMPKKATELKHLQCLEEELKPLEEALNLAPSKNFHLRPRDLISNINVIVLELKGSETTFMCEYADETATIVEFLNRWITFSQSIISTLTGGGGSGGGGSGGGGSGGGGSDKTHTCPPCPAPELLGGPSVFLFPPKPKDTLMISRTPEVTCVVVDVSHEDPEVKFNWYVDGVEVHNAKTKPREEQYGSTYRVVSVLTVLHQDWLNGKEYKCKVSNKALPAPIEKTISKAKGQPREPQVYTLPPSRDELTKNQVSLTCLVKGFYPSDIAVEWESNGQPENNYKTTPPVLDSDGSFFLYSKLTVDKSRWQQGNVFSCSVMHEALHNHYTQKSLSLSPGK

SEQ ID NO: 58 - protein, 380 aa, Artificial Sequence
  source: /note="Description of Artificial Sequence: Synthetic polypeptide"
APTSSSTKKTQLQLEDLLLDLQMILNGINNYKNPKLTRMLTFKFYMPKKATELKHLQCLEEELKPLEEALNLAPSKNFHLRPRDLISNINVIVLELKGSETTFMCEYADETATIVEFLNRWITFSQSIISTLTGGGGSGGGGSGGGGSGGGGSDKTHTCPPCPAPELLGGPSVFLFPPKPKDTLMISRTPEVTCVVVDVSHEDPEVKFNWYVDGVEVHNAKTKPREEQYGSTYRVVSVLTVLHQDWLNGKEYKCKVSNKALPAPIEKTISKAKGQPREPQVYTLPPSRDELTKNQVSLTCLVKGFYPSDIAVEWESNGQPENNYKTTPPVLDSDGSFFLYSKLTVDKSRWQQGNVFSCSVMHEALHNHYTQKSLSLSPGK

SEQ ID NO: 59 - protein, 380 aa, Artificial Sequence
  source: /note="Description of Artificial Sequence: Synthetic polypeptide"
APTSSSTKKTQLQLENLLLDLQMILNGINNYKNPKLTRMLTFKFYMPKKATELKHLQCLEEELKPLEEALNLAPSKNFHLRPRDLISNINVIVLELKGSETTFMCEYADETATIVEFLNRWITFSQSIISTLTGGGGSGGGGSGGGGSGGGGSDKTHTCPPCPAPELLGGPSVFLFPPKPKDTLMISRTPEVTCVVVDVSHEDPEVKFNWYVDGVEVHNAKTKPREEQYGSTYRVVSVLTVLHQDWLNGKEYKCKVSNKALPAPIEKTISKAKGQPREPQVYTLPPSRDELTKNQVSLTCLVKGFYPSDIAVEWESNGQPENNYKTTPPVLDSDGSFFLYSKLTVDKSRWQQGNVFSCSVMHEALHNHYTQKSLSLSPGK

SEQ ID NO: 60 - protein, 380 aa, Artificial Sequence
  source: /note="Description of Artificial Sequence: Synthetic polypeptide"
APTSSSTKKTQLQLELLLLDLQMILNGINNYKNPKLTRMLTFKFYMPKKATELKHLQCLEEELKPLEEALNLAPSKNFHLRPRDLISNINVIVLELKGSETTFMCEYADETATIVEFLNRWITFSQSIISTLTGGGGSGGGGSGGGGSGGGGSDKTHTCPPCPAPELLGGPSVFLFPPKPKDTLMISRTPEVTCVVVDVSHEDPEVKFNWYVDGVEVHNAKTKPREEQYGSTYRVVSVLTVLHQDWLNGKEYKCKVSNKALPAPIEKTISKAKGQPREPQVYTLPPSRDELTKNQVSLTCLVKGFYPSDIAVEWESNGQPENNYKTTPPVLDSDGSFFLYSKLTVDKSRWQQGNVFSCSVMHEALHNHYTQKSLSLSPGK

SEQ ID NO: 61 - protein, 380 aa, Artificial Sequence
  source: /note="Description of Artificial Sequence: Synthetic polypeptide"
APTSSSTKKTQLQLEHLLLDLQMILNGTNNYKNPKLTRMLTFKFYMPKKATELKHLQCLEEELKPLEEALNLAPSKNFHLRPRDLISNINVIVLELKGSETTFMCEYADETATIVEFLNRWITFSQSIISTLTGGGGSGGGGSGGGGSGGGGSDKTHTCPPCPAPELLGGPSVFLFPPKPKDTLMISRTPEVTCVVVDVSHEDPEVKFNWYVDGVEVHNAKTKPREEQYGSTYRVVSVLTVLHQDWLNGKEYKCKVSNKALPAPIEKTISKAKGQPREPQVYTLPPSRDELTKNQVSLTCLVKGFYPSDIAVEWESNGQPENNYKTTPPVLDSDGSFFLYSKLTVDKSRWQQGNVFSCSVMHEALHNHYTQKSLSLSPGK

SEQ ID NO: 62 - protein, 380 aa, Artificial Sequence
  source: /note="Description of Artificial Sequence: Synthetic polypeptide"
APTSSSTKKTQLQLEHLLLDLQMILNGINNYKNPKLTRMLTFKFYMPKKATELKHLQCLEEELKPLEEALNLAPSKNFHLRPRVLISNINVIVLELKGSETTFMCEYADETATIVEFLNRWITFSQSIISTLTGGGGSGGGGSGGGGSGGGGSDKTHTCPPCPAPELLGGPSVFLFPPKPKDTLMISRTPEVTCVVVDVSHEDPEVKFNWYVDGVEVHNAKTKPREEQYGSTYRVVSVLTVLHQDWLNGKEYKCKVSNKALPAPIEKTISKAKGQPREPQVYTLPPSRDELTKNQVSLTCLVKGFYPSDIAVEWESNGQPENNYKTTPPVLDSDGSFFLYSKLTVDKSRWQQGNVFSCSVMHEALHNHYTQKSLSLSPGK

SEQ ID NO: 63 - protein, 380 aa, Artificial Sequence
  source: /note="Description of Artificial Sequence: Synthetic polypeptide"
APTSSSTKKTQLQLEHLLLDLQMILNGINNYKNPKLTRMLTFKFYMPKKATELKHLQCLEEELKPLEEALNLAPSKNFHLRPRDLIRNINVIVLELKGSETTFMCEYADETATIVEFLNRWITFSQSIISTLTGGGGSGGGGSGGGGSGGGGSDKTHTCPPCPAPELLGGPSVFLFPPKPKDTLMISRTPEVTCVVVDVSHEDPEVKFNWYVDGVEVHNAKTKPREEQYGSTYRVVSVLTVLHQDWLNGKEYKCKVSNKALPAPIEKTISKAKGQPREPQVYTLPPSRDELTKNQVSLTCLVKGFYPSDIAVEWESNGQPENNYKTTPPVLDSDGSFFLYSKLTVDKSRWQQGNVFSCSVMHEALHNHYTQKSLSLSPGK

SEQ ID NO: 64 - protein, 380 aa, Artificial Sequence
  source: /note="Description of Artificial Sequence: Synthetic polypeptide"
APTSSSTKKTQLQLEHLLLDLQMILNGINNYKNPKLTRMLTFKFYMPKKATELKHLQCLEEELKPLEEALNLAPSKNFHLRPRDLISLINVIVLELKGSETTFMCEYADETATIVEFLNRWITFSQSIISTLTGGGGSGGGGSGGGGSGGGGSDKTHTCPPCPAPELLGGPSVFLFPPKPKDTLMISRTPEVTCVVVDVSHEDPEVKFNWYVDGVEVHNAKTKPREEQYGSTYRVVSVLTVLHQDWLNGKEYKCKVSNKALPAPIEKTISKAKGQPREPQVYTLPPSRDELTKNQVSLTCLVKGFYPSDIAVEWESNGQPENNYKTTPPVLDSDGSFFLYSKLTVDKSRWQQGNVFSCSVMHEALHNHYTQKSLSLSPGK

SEQ ID NO: 65 - protein, 380 aa, Artificial Sequence
  source: /note="Description of Artificial Sequence: Synthetic polypeptide"
APTSSSTKKTQLQLEHLLLDLQMILNGINNYKNPKLTRMLTFKFYMPKKATELKHLQCLEEELKPLEEALNLAPSKNFHLRPRDLISSINVIVLELKGSETTFMCEYADETATIVEFLNRWITFSQSIISTLTGGGGSGGGGSGGGGSGGGGSDKTHTCPPCPAPELLGGPSVFLFPPKPKDTLMISRTPEVTCVVVDVSHEDPEVKFNWYVDGVEVHNAKTKPREEQYGSTYRVVSVLTVLHQDWLNGKEYKCKVSNKALPAPIEKTISKAKGQPREPQVYTLPPSRDELTKNQVSLTCLVKGFYPSDIAVEWESNGQPENNYKTTPPVLDSDGSFFLYSKLTVDKSRWQQGNVFSCSVMHEALHNHYTQKSLSLSPGK

SEQ ID NO: 66 - protein, 380 aa, Artificial Sequence
  source: /note="Description of Artificial Sequence: Synthetic polypeptide"
APTSSSTKKTQLQLEHLLLDLQMILNGINNYKNPKLTRMLTFKFYMPKKATELKHLQCLEEELKPLEEALNLAPSKNFHLRPRDLISNINVSVLELKGSETTFMCEYADETATIVEFLNRWITFSQSIISTLTGGGGSGGGGSGGGGSGGGGSDKTHTCPPCPAPELLGGPSVFLFPPKPKDTLMISRTPEVTCVVVDVSHEDPEVKFNWYVDGVEVHNAKTKPREEQYGSTYRVVSVLTVLHQDWLNGKEYKCKVSNKALPAPIEKTISKAKGQPREPQVYTLPPSRDELTKNQVSLTCLVKGFYPSDIAVEWESNGQPENNYKTTPPVLDSDGSFFLYSKLTVDKSRWQQGNVFSCSVMHEALHNHYTQKSLSLSPGK

SEQ ID NO: 67 - protein, 380 aa, Artificial Sequence
  source: /note="Description of Artificial Sequence: Synthetic polypeptide"
APTSSSTKKTQLQLEHLLLDLQMILNGINNYKNPELTRMLTFKFYMPKKATELKHLQCLEEELKPLEEALNLAPSKNFHLRPRDLISNINVIVLELKGSETTFMCEYADETATIVEFLNRWITFSQSIISTLTGGGGSGGGGSGGGGSGGGGSDKTHTCPPCPAPELLGGPSVFLFPPKPKDTLMISRTPEVTCVVVDVSHEDPEVKFNWYVDGVEVHNAKTKPREEQYGSTYRVVSVLTVLHQDWLNGKEYKCKVSNKALPAPIEKTISKAKGQPREPQVYTLPPSRDELTKNQVSLTCLVKGFYPSDIAVEWESNGQPENNYKTTPPVLDSDGSFFLYSKLTVDKSRWQQGNVFSCSVMHEALHNHYTQKSLSLSPGK

SEQ ID NO: 68 - protein, 380 aa, Artificial Sequence
  source: /note="Description of Artificial Sequence: Synthetic polypeptide"
APTSSSTKKTQLQLENLLLDLQMILNGINNYKNPELTRMLTFKFYMPKKATELKHLQCLEEELKPLEEALNLAPSKNFHLRPRDLISNINVIVLELKGSETTFMCEYADETATIVEFLNRWITFSQSIISTLTGGGGSGGGGSGGGGSGGGGSDKTHTCPPCPAPELLGGPSVFLFPPKPKDTLMISRTPEVTCVVVDVSHEDPEVKFNWYVDGVEVHNAKTKPREEQYGSTYRVVSVLTVLHQDWLNGKEYKCKVSNKALPAPIEKTISKAKGQPREPQVYTLPPSRDELTKNQVSLTCLVKGFYPSDIAVEWESNGQPENNYKTTPPVLDSDGSFFLYSKLTVDKSRWQQGNVFSCSVMHEALHNHYTQKSLSLSPGK

SEQ ID NO: 69 - protein, 380 aa, Artificial Sequence
  source: /note="Description of Artificial Sequence: Synthetic polypeptide"
APTSSSTKKTQLQLELLLLDLQMILNGINNYKNPELTRMLTFKFYMPKKATELKHLQCLEEELKPLEEALNLAPSKNFHLRPRDLISNINVIVLELKGSETTFMCEYADETATIVEFLNRWITFSQSIISTLTGGGGSGGGGSGGGGSGGGGSDKTHTCPPCPAPELLGGPSVFLFPPKPKDTLMISRTPEVTCVVVDVSHEDPEVKFNWYVDGVEVHNAKTKPREEQYGSTYRVVSVLTVLHQDWLNGKEYKCKVSNKALPAPIEKTISKAKGQPREPQVYTLPPSRDELTKNQVSLTCLVKGFYPSDIAVEWESNGQPENNYKTTPPVLDSDGSFFLYSKLTVDKSRWQQGNVFSCSVMHEALHNHYTQKSLSLSPGK

SEQ ID NO: 70 - protein, 380 aa, Artificial Sequence
  source: /note="Description of Artificial Sequence: Synthetic polypeptide"
APTSSSTKKTQLQLEHLLLDLQMILNGINNYKNPELTRMLTFKFYMPKKATELKHLQCLEEELKPLEEALNLAPSKNFHLRPRVLISNINVIVLELKGSETTFMCEYADETATIVEFLNRWITFSQSIISTLTGGGGSGGGGSGGGGSGGGGSDKTHTCPPCPAPELLGGPSVFLFPPKPKDTLMISRTPEVTCVVVDVSHEDPEVKFNWYVDGVEVHNAKTKPREEQYGSTYRVVSVLTVLHQDWLNGKEYKCKVSNKALPAPIEKTISKAKGQPREPQVYTLPPSRDELTKNQVSLTCLVKGFYPSDIAVEWESNGQPENNYKTTPPVLDSDGSFFLYSKLTVDKSRWQQGNVFSCSVMHEALHNHYTQKSLSLSPGK

SEQ ID NO: 71 - protein, 380 aa, Artificial Sequence
  source: /note="Description of Artificial Sequence: Synthetic polypeptide"
APTSSSTKKTQLQLEHLLLDLQMILNGINNYKNPELTRMLTFKFYMPKKATELKHLQCLEEELKPLEEALNLAPSKNFHLRPRDLISNINVSVLELKGSETTFMCEYADETATIVEFLNRWITFSQSIISTLTGGGGSGGGGSGGGGSGGGGSDKTHTCPPCPAPELLGGPSVFLFPPKPKDTLMISRTPEVTCVVVDVSHEDPEVKFNWYVDGVEVHNAKTKPREEQYGSTYRVVSVLTVLHQDWLNGKEYKCKVSNKALPAPIEKTISKAKGQPREPQVYTLPPSRDELTKNQVSLTCLVKGFYPSDIAVEWESNGQPENNYKTTPPVLDSDGSFFLYSKLTVDKSRWQQGNVFSCSVMHEALHNHYTQKSLSLSPGK

SEQ ID NO: 72 - protein, 380 aa, Artificial Sequence
  source: /note="Description of Artificial Sequence: Synthetic polypeptide"
APTSSSTKKTQLQLEHLLLDLQMILNGINNYKNPKLTQMLTFKFYMPKKATELKHLQCLEEELKPLEEALNLAPSKNFHLRPRDLISNINVIVLELKGSETTFMCEYADETATIVEFLNRWITFSQSIISTLTGGGGSGGGGSGGGGSGGGGSDKTHTCPPCPAPELLGGPSVFLFPPKPKDTLMISRTPEVTCVVVDVSHEDPEVKFNWYVDGVEVHNAKTKPREEQYGSTYRVVSVLTVLHQDWLNGKEYKCKVSNKALPAPIEKTISKAKGQPREPQVYTLPPSRDELTKNQVSLTCLVKGFYPSDIAVEWESNGQPENNYKTTPPVLDSDGSFFLYSKLTVDKSRWQQGNVFSCSVMHEALHNHYTQKSLSLSPGK

SEQ ID NO: 73 - protein, 380 aa, Artificial Sequence
  source: /note="Description of Artificial Sequence: Synthetic polypeptide"
APTSSSTKKTQLQLENLLLDLQMILNGINNYKNPKLTQMLTFKFYMPKKATELKHLQCLEEELKPLEEALNLAPSKNFHLRPRDLISNINVIVLELKGSETTFMCEYADETATIVEFLNRWITFSQSIISTLTGGGGSGGGGSGGGGSGGGGSDKTHTCPPCPAPELLGGPSVFLFPPKPKDTLMISRTPEVTCVVVDVSHEDPEVKFNWYVDGVEVHNAKTKPREEQYGSTYRVVSVLTVLHQDWLNGKEYKCKVSNKALPAPIEKTISKAKGQPREPQVYTLPPSRDELTKNQVSLTCLVKGFYPSDIAVEWESNGQPENNYKTTPPVLDSDGSFFLYSKLTVDKSRWQQGNVFSCSVMHEALHNHYTQKSLSLSPGK

SEQ ID NO: 74 - protein, 380 aa, Artificial Sequence
  source: /note="Description of Artificial Sequence: Synthetic polypeptide"
APTSSSTKKTQLQLELLLLDLQMILNGINNYKNPKLTQMLTFKFYMPKKATELKHLQCLEEELKPLEEALNLAPSKNFHLRPRDLISNINVIVLELKGSETTFMCEYADETATIVEFLNRWITFSQSIISTLTGGGGSGGGGSGGGGSGGGGSDKTHTCPPCPAPELLGGPSVFLFPPKPKDTLMISRTPEVTCVVVDVSHEDPEVKFNWYVDGVEVHNAKTKPREEQYGSTYRVVSVLTVLHQDWLNGKEYKCKVSNKALPAPIEKTISKAKGQPREPQVYTLPPSRDELTKNQVSLTCLVKGFYPSDIAVEWESNGQPENNYKTTPPVLDSDGSFFLYSKLTVDKSRWQQGNVFSCSVMHEALHNHYTQKSLSLSPGK

SEQ ID NO: 75 - protein, 380 aa, Artificial Sequence
  source: /note="Description of Artificial Sequence: Synthetic polypeptide"
APTSSSTKKTQLQLEHLLLDLQMILNGINNYKNPKLTQMLTFKFYMPKKATELKHLQCLEEELKPLEEALNLAPSKNFHLRPRVLISNINVIVLELKGSETTFMCEYADETATIVEFLNRWITFSQSIISTLTGGGGSGGGGSGGGGSGGGGSDKTHTCPPCPAPELLGGPSVFLFPPKPKDTLMISRTPEVTCVVVDVSHEDPEVKFNWYVDGVEVHNAKTKPREEQYGSTYRVVSVLTVLHQDWLNGKEYKCKVSNKALPAPIEKTISKAKGQPREPQVYTLPPSRDELTKNQVSLTCLVKGFYPSDIAVEWESNGQPENNYKTTPPVLDSDGSFFLYSKLTVDKSRWQQGNVFSCSVMHEALHNHYTQKSLSLSPGK

SEQ ID NO: 76 - protein, 380 aa, Artificial Sequence
  source: /note="Description of Artificial Sequence: Synthetic polypeptide"
APTSSSTKKTQLQLEHLLLDLQMILNGINNYKNPKLTQMLTFKFYMPKKATELKHLQCLEEELKPLEEALNLAPSKNFHLRPRDLISNINVSVLELKGSETTFMCEYADETATIVEFLNRWITFSQSIISTLTGGGGSGGGGSGGGGSGGGGSDKTHTCPPCPAPELLGGPSVFLFPPKPKDTLMISRTPEVTCVVVDVSHEDPEVKFNWYVDGVEVHNAKTKPREEQYGSTYRVVSVLTVLHQDWLNGKEYKCKVSNKALPAPIEKTISKAKGQPREPQVYTLPPSRDELTKNQVSLTCLVKGFYPSDIAVEWESNGQPENNYKTTPPVLDSDGSFFLYSKLTVDKSRWQQGNVFSCSVMHEALHNHYTQKSLSLSPGK

SEQ ID NO: 77 - protein, 380 aa, Artificial Sequence
  source: /note="Description of Artificial Sequence: Synthetic polypeptide"
APTSSSTKKTQLQLEHLLLDLQMILNGINNYKNPKLTNMLTFKFYMPKKATELKHLQCLEEELKPLEEALNLAPSKNFHLRPRDLISNINVIVLELKGSETTFMCEYADETATIVEFLNRWITFSQSIISTLTGGGGSGGGGSGGGGSGGGGSDKTHTCPPCPAPELLGGPSVFLFPPKPKDTLMISRTPEVTCVVVDVSHEDPEVKFNWYVDGVEVHNAKTKPREEQYGSTYRVVSVLTVLHQDWLNGKEYKCKVSNKALPAPIEKTISKAKGQPREPQVYTLPPSRDELTKNQVSLTCLVKGFYPSDIAVEWESNGQPENNYKTTPPVLDSDGSFFLYSKLTVDKSRWQQGNVFSCSVMHEALHNHYTQKSLSLSPGK

SEQ ID NO: 78 - protein, 380 aa, Artificial Sequence
  source: /note="Description of Artificial Sequence: Synthetic polypeptide"
APTSSSTKKTQLQLENLLLDLQMILNGINNYKNPKLTNMLTFKFYMPKKATELKHLQCLEEELKPLEEALNLAPSKNFHLRPRDLISNINVIVLELKGSETTFMCEYADETATIVEFLNRWITFSQSIISTLTGGGGSGGGGSGGGGSGGGGSDKTHTCPPCPAPELLGGPSVFLFPPKPKDTLMISRTPEVTCVVVDVSHEDPEVKFNWYVDGVEVHNAKTKPREEQYGSTYRVVSVLTVLHQDWLNGKEYKCKVSNKALPAPIEKTISKAKGQPREPQVYTLPPSRDELTKNQVSLTCLVKGFYPSDIAVEWESNGQPENNYKTTPPVLDSDGSFFLYSKLTVDKSRWQQGNVFSCSVMHEALHNHYTQKSLSLSPGK

SEQ ID NO: 79 - protein, 380 aa, Artificial Sequence
  source: /note="Description of Artificial Sequence: Synthetic polypeptide"
APTSSSTKKTQLQLELLLLDLQMILNGINNYKNPKLTNMLTFKFYMPKKATELKHLQCLEEELKPLEEALNLAPSKNFHLRPRDLISNINVIVLELKGSETTFMCEYADETATIVEFLNRWITFSQSIISTLTGGGGSGGGGSGGGGSGGGGSDKTHTCPPCPAPELLGGPSVFLFPPKPKDTLMISRTPEVTCVVVDVSHEDPEVKFNWYVDGVEVHNAKTKPREEQYGSTYRVVSVLTVLHQDWLNGKEYKCKVSNKALPAPIEKTISKAKGQPREPQVYTLPPSRDELTKNQVSLTCLVKGFYPSDIAVEWESNGQPENNYKTTPPVLDSDGSFFLYSKLTVDKSRWQQGNVFSCSVMHEALHNHYTQKSLSLSPGK

SEQ ID NO: 80 - protein, 380 aa, Artificial Sequence
  source: /note="Description of Artificial Sequence: Synthetic polypeptide"
APTSSSTKKTQLQLEHLLLDLQMILNGINNYKNPKLTNMLTFKFYMPKKATELKHLQCLEEELKPLEEALNLAPSKNFHLRPRVLISNINVIVLELKGSETTFMCEYADETATIVEFLNRWITFSQSIISTLTGGGGSGGGGSGGGGSGGGGSDKTHTCPPCPAPELLGGPSVFLFPPKPKDTLMISRTPEVTCVVVDVSHEDPEVKFNWYVDGVEVHNAKTKPREEQYGSTYRVVSVLTVLHQDWLNGKEYKCKVSNKALPAPIEKTISKAKGQPREPQVYTLPPSRDELTKNQVSLTCLVKGFYPSDIAVEWESNGQPENNYKTTPPVLDSDGSFFLYSKLTVDKSRWQQGNVFSCSVMHEALHNHYTQKSLSLSPGK

SEQ ID NO: 81 - protein, 380 aa, Artificial Sequence
  source: /note="Description of Artificial Sequence: Synthetic polypeptide"
APTSSSTKKTQLQLEHLLLDLQMILNGINNYKNPKLTNMLTFKFYMPKKATELKHLQCLEEELKPLEEALNLAPSKNFHLRPRDLISNINVSVLELKGSETTFMCEYADETATIVEFLNRWITFSQSIISTLTGGGGSGGGGSGGGGSGGGGSDKTHTCPPCPAPELLGGPSVFLFPPKPKDTLMISRTPEVTCVVVDVSHEDPEVKFNWYVDGVEVHNAKTKPREEQYGSTYRVVSVLTVLHQDWLNGKEYKCKVSNKALPAPIEKTISKAKGQPREPQVYTLPPSRDELTKNQVSLTCLVKGFYPSDIAVEWESNGQPENNYKTTPPVLDSDGSFFLYSKLTVDKSRWQQGNVFSCSVMHEALHNHYTQKSLSLSPGK

SEQ ID NO: 82 - protein, 380 aa, Artificial Sequence
  source: /note="Description of Artificial Sequence: Synthetic polypeptide"
APTSSSTKKTQLQLEHLLLDLQMILNGINNYKNPKLTEMLTFKFYMPKKATELKHLQCLEEELKPLEEALNLAPSKNFHLRPRDLISNINVIVLELKGSETTFMCEYADETATIVEFLNRWITFSQSIISTLTGGGGSGGGGSGGGGSGGGGSDKTHTCPPCPAPELLGGPSVFLFPPKPKDTLMISRTPEVTCVVVDVSHEDPEVKFNWYVDGVEVHNAKTKPREEQYGSTYRVVSVLTVLHQDWLNGKEYKCKVSNKALPAPIEKTISKAKGQPREPQVYTLPPSRDELTKNQVSLTCLVKGFYPSDIAVEWESNGQPENNYKTTPPVLDSDGSFFLYSKLTVDKSRWQQGNVFSCSVMHEALHNHYTQKSLSLSPGK

SEQ ID NO: 83 - protein, 380 aa, Artificial Sequence
  source: /note="Description of Artificial Sequence: Synthetic polypeptide"
APTSSSTKKTQLQLEHLLLDLQMILNGINNYKNPKLTRMLTKKFYMPKKATELKHLQCLEEELKPLEEALNLAPSKNFHLRPRDLISNINVIVLELKGSETTFMCEYADETATIVEFLNRWITFSQSIISTLTGGGGSGGGGSGGGGSGGGGSDKTHTCPPCPAPELLGGPSVFLFPPKPKDTLMISRTPEVTCVVVDVSHEDPEVKFNWYVDGVEVHNAKTKPREEQYGSTYRVVSVLTVLHQDWLNGKEYKCKVSNKALPAPIEKTISKAKGQPREPQVYTLPPSRDELTKNQVSLTCLVKGFYPSDIAVEWESNGQPENNYKTTPPVLDSDGSFFLYSKLTVDKSRWQQGNVFSCSVMHEALHNHYTQKSLSLSPGK

SEQ ID NO: 84 - protein, 380 aa, Artificial Sequence
  source: /note="Description of Artificial Sequence: Synthetic polypeptide"
APTSSSTKKTQLQLEHLLLDLQMILNGINNYKNPKLTRMLTQKFYMPKKATELKHLQCLEEELKPLEEALNLAPSKNFHLRPRDLISNINVIVLELKGSETTFMCEYADETATIVEFLNRWITFSQSIISTLTGGGGSGGGGSGGGGSGGGGSDKTHTCPPCPAPELLGGPSVFLFPPKPKDTLMISRTPEVTCVVVDVSHEDPEVKFNWYVDGVEVHNAKTKPREEQYGSTYRVVSVLTVLHQDWLNGKEYKCKVSNKALPAPIEKTISKAKGQPREPQVYTLPPSRDELTKNQVSLTCLVKGFYPSDIAVEWESNGQPENNYKTTPPVLDSDGSFFLYSKLTVDKSRWQQGNVFSCSVMHEALHNHYTQKSLSLSPGK

SEQ ID NO: 85 - protein, 380 aa, Artificial Sequence
  source: /note="Description of Artificial Sequence: Synthetic polypeptide"
APTSSSTKKTQLQLEHLLLDLQMILNGINNYKNPKLTRMLTAKFAMPKKATELKHLQCLEEELKPLEEALNGAPSKNFHLRPRDLISDINVIVLELKGSETTFMCEYADETATIVEFLNRWITFSQSIISTLTGGGGSGGGGSGGGGSGGGGSDKTHTCPPCPAPELLGGPSVFLFPPKPKDTLMISRTPEVTCVVVDVSHEDPEVKFNWYVDGVEVHNAKTKPREEQYGSTYRVVSVLTVLHQDWLNGKEYKCKVSNKALPAPIEKTISKAKGQPREPQVYTLPPSRDELTKNQVSLTCLVKGFYPSDIAVEWESNGQPENNYKTTPPVLDSDGSFFLYSKLTVDKSRWQQGNVFSCSVMHEALHNHYTQKSLSLSPGK

SEQ ID NO: 86 - protein, 380 aa, Artificial Sequence
  source: /note="Description of Artificial Sequence: Synthetic polypeptide"
APTSSSTKKTQLQLEHLLLDLQMILNGINNYKNPKLTNMLTFKFYMPKKATELKHLQCLEEELKPLEEALNLAPSKNFHLRPRDLIRNINVIVLELKGSETTFMCEYADETATIVEFLNRWITFSQSIISTLTGGGGSGGGGSGGGGSGGGGSDKTHTCPPCPAPELLGGPSVFLFPPKPKDTLMISRTPEVTCVVVDVSHEDPEVKFNWYVDGVEVHNAKTKPREEQYGSTYRVVSVLTVLHQDWLNGKEYKCKVSNKALPAPIEKTISKAKGQPREPQVYTLPPSRDELTKNQVSLTCLVKGFYPSDIAVEWESNGQPENNYKTTPPVLDSDGSFFLYSKLTVDKSRWQQGNVFSCSVMHEALHNHYTQKSLSLSPGK

SEQ ID NO: 87 - protein, 380 aa, Artificial Sequence
  source: /note="Description of Artificial Sequence: Synthetic polypeptide"
APTSSSTKKTQLQLENLLLDLQMILNGINNYKNPKLTEMLTFKFYMPKKATELKHLQCLEEELKPLEEALNLAPSKNFHLRPRDLISNINVIVLELKGSETTFMCEYADETATIVEFLNRWITFSQSIISTLTGGGGSGGGGSGGGGSGGGGSDKTHTCPPCPAPELLGGPSVFLFPPKPKDTLMISRTPEVTCVVVDVSHEDPEVKFNWYVDGVEVHNAKTKPREEQYGSTYRVVSVLTVLHQDWLNGKEYKCKVSNKALPAPIEKTISKAKGQPREPQVYTLPPSRDELTKNQVSLTCLVKGFYPSDIAVEWESNGQPENNYKTTPPVLDSDGSFFLYSKLTVDKSRWQQGNVFSCSVMHEALHNHYTQKSLSLSPGK

SEQ ID NO: 88 - protein, 380 aa, Artificial Sequence
  source: /note="Description of Artificial Sequence: Synthetic polypeptide"
APTSSSTKKTQLQLEHLLLDLQMILNGINNYKNPKLTEMLTFKFYMPKKATELKHLQCLEEELKPLEEALNLAPSKNFHLRPRVLISNINVIVLELKGSETTFMCEYADETATIVEFLNRWITFSQSIISTLTGGGGSGGGGSGGGGSGGGGSDKTHTCPPCPAPELLGGPSVFLFPPKPKDTLMISRTPEVTCVVVDVSHEDPEVKFNWYVDGVEVHNAKTKPREEQYGSTYRVVSVLTVLHQDWLNGKEYKCKVSNKALPAPIEKTISKAKGQPREPQVYTLPPSRDELTKNQVSLTCLVKGFYPSDIAVEWESNGQPENNYKTTPPVLDSDGSFFLYSKLTVDKSRWQQGNVFSCSVMHEALHNHYTQKSLSLSPGK

SEQ ID NO: 89 - protein, 380 aa, Artificial Sequence
  source: /note="Description of Artificial Sequence: Synthetic polypeptide"
APTSSSTKKTQLQLEHLLLDLQMILNGINNYKNPKLTEMLTFKFYMPKKATELKHLQCLEEELKPLEEALNLAPSKNFHLRPRDLIRNINVIVLELKGSETTFMCEYADETATIVEFLNRWITFSQSIISTLTGGGGSGGGGSGGGGSGGGGSDKTHTCPPCPAPELLGGPSVFLFPPKPKDTLMISRTPEVTCVVVDVSHEDPEVKFNWYVDGVEVHNAKTKPREEQYGSTYRVVSVLTVLHQDWLNGKEYKCKVSNKALPAPIEKTISKAKGQPREPQVYTLPPSRDELTKNQVSLTCLVKGFYPSDIAVEWESNGQPENNYKTTPPVLDSDGSFFLYSKLTVDKSRWQQGNVFSCSVMHEALHNHYTQKSLSLSPGK

SEQ ID NO: 90 - protein, 380 aa, Artificial Sequence
  source: /note="Description of Artificial Sequence: Synthetic polypeptide"
APTSSSTKKTQLQLEHLLLDLQMILNGINNYKNPKLTEMLTFKFYMPKKATELKHLQCLEEELKPLEEALNLAPSKNFHLRPRDLISNINVSVLELKGSETTFMCEYADETATIVEFLNRWITFSQSIISTLTGGGGSGGGGSGGGGSGGGGSDKTHTCPPCPAPELLGGPSVFLFPPKPKDTLMISRTPEVTCVVVDVSHEDPEVKFNWYVDGVEVHNAKTKPREEQYGSTYRVVSVLTVLHQDWLNGKEYKCKVSNKALPAPIEKTISKAKGQPREPQVYTLPPSRDELTKNQVSLTCLVKGFYPSDIAVEWESNGQPENNYKTTPPVLDSDGSFFLYSKLTVDKSRWQQGNVFSCSVMHEALHNHYTQKSLSLSPGK

SEQ ID NO: 91 - protein, 380 aa, Artificial Sequence
  source: /note="Description of Artificial Sequence: Synthetic polypeptide"
APTSSSTKKTQLQLENLLLDLQMILNGINNYKNPKLTRMLTQKFYMPKKATELKHLQCLEEELKPLEEALNLAPSKNFHLRPRDLISNINVIVLELKGSETTFMCEYADETATIVEFLNRWITFSQSIISTLTGGGGSGGGGSGGGGSGGGGSDKTHTCPPCPAPELLGGPSVFLFPPKPKDTLMISRTPEVTCVVVDVSHEDPEVKFNWYVDGVEVHNAKTKPREEQYGSTYRVVSVLTVLHQDWLNGKEYKCKVSNKALPAPIEKTISKAKGQPREPQVYTLPPSRDELTKNQVSLTCLVKGFYPSDIAVEWESNGQPENNYKTTPPVLDSDGSFFLYSKLTVDKSRWQQGNVFSCSVMHEALHNHYTQKSLSLSPGK

SEQ ID NO: 92 - protein, 380 aa, Artificial Sequence
  source: /note="Description of Artificial Sequence: Synthetic polypeptide"
APTSSSTKKTQLQLEHLLLDLQMILNGINNYKNPKLTRMLTQKFYMPKKATELKHLQCLEEELKPLEEALNLAPSKNFHLRPRDLISNINVSVLELKGSETTFMCEYADETATIVEFLNRWITFSQSIISTLTGGGGSGGGGSGGGGSGGGGSDKTHTCPPCPAPELLGGPSVFLFPPKPKDTLMISRTPEVTCVVVDVSHEDPEVKFNWYVDGVEVHNAKTKPREEQYGSTYRVVSVLTVLHQDWLNGKEYKCKVSNKALPAPIEKTISKAKGQPREPQVYTLPPSRDELTKNQVSLTCLVKGFYPSDIAVEWESNGQPENNYKTTPPVLDSDGSFFLYSKLTVDKSRWQQGNVFSCSVMHEALHNHYTQKSLSLSPGK

SEQ ID NO: 93 - protein, 380 aa, Artificial Sequence
  source: /note="Description of Artificial Sequence: Synthetic polypeptide"
APTSSSTKKTQLQLENLLLDLQMILNGINNYKNPELTNMLTFKFYMPKKATELKHLQCLEEELKPLEEALNLAPSKNFHLRPRDLISNINVIVLELKGSETTFMCEYADETATIVEFLNRWITFSQSIISTLTGGGGSGGGGSGGGGSGGGGSDKTHTCPPCPAPELLGGPSVFLFPPKPKDTLMISRTPEVTCVVVDVSHEDPEVKFNWYVDGVEVHNAKTKPREEQYGSTYRVVSVLTVLHQDWLNGKEYKCKVSNKALPAPIEKTISKAKGQPREPQVYTLPPSRDELTKNQVSLTCLVKGFYPSDIAVEWESNGQPENNYKTTPPVLDSDGSFFLYSKLTVDKSRWQQGNVFSCSVMHEALHNHYTQKSLSLSPGK

SEQ ID NO: 94 - protein, 380 aa, Artificial Sequence
  source: /note="Description of Artificial Sequence: Synthetic polypeptide"
APTSSSTKKTQLQLEHLLLDLQMILNGINNYKNPKLTRMLTFKFYMPKKATELKHLQCLEEELKPLEEVLNLAQSKNFHLRPRDLISNINVIVLELKGSETTFMCEYADETATIVEFLNRWITFSQSIISTLTGGGGSGGGGSGGGGSGGGGSDKTHTCPPCPAPEAAGGPSVFLFPPKPKDTLMISRTPEVTCVVVDVSHEDPEVKFNWYVDGVEVHNAKTKPREEQYNSTYRVVSVLTVLHQDWLNGKEYKCKVSNKALGAPIEKTISKAKGQPREPQVYTLPPSRDELTKNQVSLTCLVKGFYPSDIAVEWESNGQPENNYKTTPPVLDSDGSFFLYSKLTVDKSRWQQGNVFSCSVMHEALHNHYTQKSLSLSPGK

SEQ ID NO: 95 - protein, 380 aa, Artificial Sequence
  source: /note="Description of Artificial Sequence: Synthetic polypeptide"
APTSSSTKKTQLQLEHLLLDLQMILNGINNYKNPKLTRMLTFKFYMPKKATELKHLQCLEEELKPLEEALNLAPSKNFHLRPRDLISNINVIVLELKGSETTFMCEYADETATIVEFLNRWITFSQSIISTLTGGGGSGGGGSGGGGSGGGGSDKTHTCPPCPAPEAAGGPSVFLFPPKPKDTLMISRTPEVTCVVVDVSHEDPEVKFNWYVDGVEVHNAKTKPREEQYNSTYRVVSVLTVLHQDWLNGKEYKCKVSNKALGAPIEKTISKAKGQPREPQVYTLPPSRDELTKNQVSLTCLVKGFYPSDIAVEWESNGQPENNYKTTPPVLDSDGSFFLYSKLTVDKSRWQQGNVFSCSVMHEALHNHYTQKSLSLSPGK

SEQ ID NO: 96 - protein, 380 aa, Artificial Sequence
  source: /note="Description of Artificial Sequence: Synthetic polypeptide"
APTSSSTKKTQLQLEDLLLDLQMILNGINNYKNPKLTRMLTFKFYMPKKATELKHLQCLEEELKPLEEALNLAPSKNFHLRPRDLISNINVIVLELKGSETTFMCEYADETATIVEFLNRWITFSQSIISTLTGGGGSGGGGSGGGGSGGGGSDKTHTCPPCPAPEAAGGPSVFLFPPKPKDTLMISRTPEVTCVVVDVSHEDPEVKFNWYVDGVEVHNAKTKPREEQYNSTYRVVSVLTVLHQDWLNGKEYKCKVSNKALGAPIEKTISKAKGQPREPQVYTLPPSRDELTKNQVSLTCLVKGFYPSDIAVEWESNGQPENNYKTTPPVLDSDGSFFLYSKLTVDKSRWQQGNVFSCSVMHEALHNHYTQKSLSLSPGK

SEQ ID NO: 97 - protein, 380 aa, Artificial Sequence
  source: /note="Description of Artificial Sequence: Synthetic polypeptide"
APTSSSTKKTQLQLENLLLDLQMILNGINNYKNPKLTRMLTFKFYMPKKATELKHLQCLEEELKPLEEALNLAPSKNFHLRPRDLISNINVIVLELKGSETTFMCEYADETATIVEFLNRWITFSQSIISTLTGGGGSGGGGSGGGGSGGGGSDKTHTCPPCPAPEAAGGPSVFLFPPKPKDTLMISRTPEVTCVVVDVSHEDPEVKFNWYVDGVEVHNAKTKPREEQYNSTYRVVSVLTVLHQDWLNGKEYKCKVSNKALGAPIEKTISKAKGQPREPQVYTLPPSRDELTKNQVSLTCLVKGFYPSDIAVEWESNGQPENNYKTTPPVLDSDGSFFLYSKLTVDKSRWQQGNVFSCSVMHEALHNHYTQKSLSLSPGK

SEQ ID NO: 98 - protein, 380 aa, Artificial Sequence
  source: /note="Description of Artificial Sequence: Synthetic polypeptide"
APTSSSTKKTQLQLELLLLDLQMILNGINNYKNPKLTRMLTFKFYMPKKATELKHLQCLEEELKPLEEALNLAPSKNFHLRPRDLISNINVIVLELKGSETTFMCEYADETATIVEFLNRWITFSQSIISTLTGGGGSGGGGSGGGGSGGGGSDKTHTCPPCPAPEAAGGPSVFLFPPKPKDTLMISRTPEVTCVVVDVSHEDPEVKFNWYVDGVEVHNAKTKPREEQYNSTYRVVSVLTVLHQDWLNGKEYKCKVSNKALGAPIEKTISKAKGQPREPQVYTLPPSRDELTKNQVSLTCLVKGFYPSDIAVEWESNGQPENNYKTTPPVLDSDGSFFLYSKLTVDKSRWQQGNVFSCSVMHEALHNHYTQKSLSLSPGK

SEQ ID NO: 99 - protein, 380 aa, Artificial Sequence
  source: /note="Description of Artificial Sequence: Synthetic polypeptide"
APTSSSTKKTQLQLEHLLLDLQMILNGTNNYKNPKLTRMLTFKFYMPKKATELKHLQCLEEELKPLEEALNLAPSKNFHLRPRDLISNINVIVLELKGSETTFMCEYADETATIVEFLNRWITFSQSIISTLTGGGGSGGGGSGGGGSGGGGSDKTHTCPPCPAPEAAGGPSVFLFPPKPKDTLMISRTPEVTCVVVDVSHEDPEVKFNWYVDGVEVHNAKTKPREEQYNSTYRVVSVLTVLHQDWLNGKEYKCKVSNKALGAPIEKTISKAKGQPREPQVYTLPPSRDELTKNQVSLTCLVKGFYPSDIAVEWESNGQPENNYKTTPPVLDSDGSFFLYSKLTVDKSRWQQGNVFSCSVMHEALHNHYTQKSLSLSPGK

SEQ ID NO: 100 - protein, 380 aa, Artificial Sequence
  source: /note="Description of Artificial Sequence: Synthetic polypeptide"
APTSSSTKKTQLQLEHLLLDLQMILNGINNYKNPKLTRMLTFKFYMPKKATELKHLQCLEEELKPLEEALNLAPSKNFHLRPRVLISNINVIVLELKGSETTFMCEYADETATIVEFLNRWITFSQSIISTLTGGGGSGGGGSGGGGSGGGGSDKTHTCPPCPAPEAAGGPSVFLFPPKPKDTLMISRTPEVTCVVVDVSHEDPEVKFNWYVDGVEVHNAKTKPREEQYNSTYRVVSVLTVLHQDWLNGKEYKCKVSNKALGAPIEKTISKAKGQPREPQVYTLPPSRDELTKNQVSLTCLVKGFYPSDIAVEWESNGQPENNYKTTPPVLDSDGSFFLYSKLTVDKSRWQQGNVFSCSVMHEALHNHYTQKSLSLSPGK

SEQ ID NO: 101 - protein, 380 aa, Artificial Sequence
  source: /note="Description of Artificial Sequence: Synthetic polypeptide"
APTSSSTKKTQLQLEHLLLDLQMILNGINNYKNPKLTRMLTFKFYMPKKATELKHLQCLEEELKPLEEALNLAPSKNFHLRPRDLIRNINVIVLELKGSETTFMCEYADETATIVEFLNRWITFSQSIISTLTGGGGSGGGGSGGGGSGGGGSDKTHTCPPCPAPEAAGGPSVFLFPPKPKDTLMISRTPEVTCVVVDVSHEDPEVKFNWYVDGVEVHNAKTKPREEQYNSTYRVVSVLTVLHQDWLNGKEYKCKVSNKALGAPIEKTISKAKGQPREPQVYTLPPSRDELTKNQVSLTCLVKGFYPSDIAVEWESNGQPENNYKTTPPVLDSDGSFFLYSKLTVDKSRWQQGNVFSCSVMHEALHNHYTQKSLSLSPGK

SEQ ID NO: 102 - protein, 380 aa, Artificial Sequence
  source: /note="Description of Artificial Sequence: Synthetic polypeptide"
APTSSSTKKTQLQLEHLLLDLQMILNGINNYKNPKLTRMLTFKFYMPKKATELKHLQCLEEELKPLEEALNLAPSKNFHLRPRDLISLINVIVLELKGSETTFMCEYADETATIVEFLNRWITFSQSIISTLTGGGGSGGGGSGGGGSGGGGSDKTHTCPPCPAPEAAGGPSVFLFPPKPKDTLMISRTPEVTCVVVDVSHEDPEVKFNWYVDGVEVHNAKTKPREEQYNSTYRVVSVLTVLHQDWLNGKEYKCKVSNKALGAPIEKTISKAKGQPREPQVYTLPPSRDELTKNQVSLTCLVKGFYPSDIAVEWESNGQPENNYKTTPPVLDSDGSFFLYSKLTVDKSRWQQGNVFSCSVMHEALHNHYTQKSLSLSPGK

SEQ ID NO: 103 - protein, 380 aa, Artificial Sequence
  source: /note="Description of Artificial Sequence: Synthetic polypeptide"
APTSSSTKKTQLQLEHLLLDLQMILNGINNYKNPKLTRMLTFKFYMPKKATELKHLQCLEEELKPLEEALNLAPSKNFHLRPRDLISSINVIVLELKGSETTFMCEYADETATIVEFLNRWITFSQSIISTLTGGGGSGGGGSGGGGSGGGGSDKTHTCPPCPAPEAAGGPSVFLFPPKPKDTLMISRTPEVTCVVVDVSHEDPEVKFNWYVDGVEVHNAKTKPREEQYNSTYRVVSVLTVLHQDWLNGKEYKCKVSNKALGAPIEKTISKAKGQPREPQVYTLPPSRDELTKNQVSLTCLVKGFYPSDIAVEWESNGQPENNYKTTPPVLDSDGSFFLYSKLTVDKSRWQQGNVFSCSVMHEALHNHYTQKSLSLSPGK

SEQ ID NO: 104 - protein, 380 aa, Artificial Sequence
  source: /note="Description of Artificial Sequence: Synthetic polypeptide"
APTSSSTKKTQLQLEHLLLDLQMILNGINNYKNPKLTRMLTFKFYMPKKATELKHLQCLEEELKPLEEALNLAPSKNFHLRPRDLISNINVSVLELKGSETTFMCEYADETATIVEFLNRWITFSQSIISTLTGGGGSGGGGSGGGGSGGGGSDKTHTCPPCPAPEAAGGPSVFLFPPKPKDTLMISRTPEVTCVVVDVSHEDPEVKFNWYVDGVEVHNAKTKPREEQYNSTYRVVSVLTVLHQDWLNGKEYKCKVSNKALGAPIEKTISKAKGQPREPQVYTLPPSRDELTKNQVSLTCLVKGFYPSDIAVEWESNGQPENNYKTTPPVLDSDGSFFLYSKLTVDKSRWQQGNVFSCSVMHEALHNHYTQKSLSLSPGK

SEQ ID NO: 105 - protein, 380 aa, Artificial Sequence
  source: /note="Description of Artificial Sequence: Synthetic polypeptide"
APTSSSTKKTQLQLEHLLLDLQMILNGINNYKNPELTRMLTFKFYMPKKATELKHLQCLEEELKPLEEALNLAPSKNFHLRPRDLISNINVIVLELKGSETTFMCEYADETATIVEFLNRWITFSQSIISTLTGGGGSGGGGSGGGGSGGGGSDKTHTCPPCPAPEAAGGPSVFLFPPKPKDTLMISRTPEVTCVVVDVSHEDPEVKFNWYVDGVEVHNAKTKPREEQYNSTYRVVSVLTVLHQDWLNGKEYKCKVSNKALGAPIEKTISKAKGQPREPQVYTLPPSRDELTKNQVSLTCLVKGFYPSDIAVEWESNGQPENNYKTTPPVLDSDGSFFLYSKLTVDKSRWQQGNVFSCSVMHEALHNHYTQKSLSLSPGK

SEQ ID NO: 106 - protein, 380 aa, Artificial Sequence
  source: /note="Description of Artificial Sequence: Synthetic polypeptide"
APTSSSTKKTQLQLENLLLDLQMILNGINNYKNPELTRMLTFKFYMPKKATELKHLQCLEEELKPLEEALNLAPSKNFHLRPRDLISNINVIVLELKGSETTFMCEYADETATIVEFLNRWITFSQSIISTLTGGGGSGGGGSGGGGSGGGGSDKTHTCPPCPAPEAAGGPSVFLFPPKPKDTLMISRTPEVTCVVVDVSHEDPEVKFNWYVDGVEVHNAKTKPREEQYNSTYRVVSVLTVLHQDWLNGKEYKCKVSNKALGAPIEKTISKAKGQPREPQVYTLPPSRDELTKNQVSLTCLVKGFYPSDIAVEWESNGQPENNYKTTPPVLDSDGSFFLYSKLTVDKSRWQQGNVFSCSVMHEALHNHYTQKSLSLSPGK

SEQ ID NO: 107 - protein, 380 aa, Artificial Sequence
  source: /note="Description of Artificial Sequence: Synthetic polypeptide"
APTSSSTKKTQLQLELLLLDLQMILNGINNYKNPELTRMLTFKFYMPKKATELKHLQCLEEELKPLEEALNLAPSKNFHLRPRDLISNINVIVLELKGSETTFMCEYADETATIVEFLNRWITFSQSIISTLTGGGGSGGGGSGGGGSGGGGSDKTHTCPPCPAPEAAGGPSVFLFPPKPKDTLMISRTPEVTCVVVDVSHEDPEVKFNWYVDGVEVHNAKTKPREEQYNSTYRVVSVLTVLHQDWLNGKEYKCKVSNKALGAPIEKTISKAKGQPREPQVYTLPPSRDELTKNQVSLTCLVKGFYPSDIAVEWESNGQPENNYKTTPPVLDSDGSFFLYSKLTVDKSRWQQGNVFSCSVMHEALHNHYTQKSLSLSPGK

SEQ ID NO: 108 - protein, 380 aa, Artificial Sequence
  source: /note="Description of Artificial Sequence: Synthetic polypeptide"
APTSSSTKKTQLQLEHLLLDLQMILNGINNYKNPELTRMLTFKFYMPKKATELKHLQCLEEELKPLEEALNLAPSKNFHLRPRVLISNINVIVLELKGSETTFMCEYADETATIVEFLNRWITFSQSIISTLTGGGGSGGGGSGGGGSGGGGSDKTHTCPPCPAPEAAGGPSVFLFPPKPKDTLMISRTPEVTCVVVDVSHEDPEVKFNWYVDGVEVHNAKTKPREEQYNSTYRVVSVLTVLHQDWLNGKEYKCKVSNKALGAPIEKTISKAKGQPREPQVYTLPPSRDELTKNQVSLTCLVKGFYPSDIAVEWESNGQPENNYKTTPPVLDSDGSFFLYSKLTVDKSRWQQGNVFSCSVMHEALHNHYTQKSLSLSPGK

SEQ ID NO: 109 - protein, 380 aa, Artificial Sequence
  source: /note="Description of Artificial Sequence: Synthetic polypeptide"
APTSSSTKKTQLQLEHLLLDLQMILNGINNYKNPELTRMLTFKFYMPKKATELKHLQCLEEELKPLEEALNLAPSKNFHLRPRDLISNINVSVLELKGSETTFMCEYADETATIVEFLNRWITFSQSIISTLTGGGGSGGGGSGGGGSGGGGSDKTHTCPPCPAPEAAGGPSVFLFPPKPKDTLMISRTPEVTCVVVDVSHEDPEVKFNWYVDGVEVHNAKTKPREEQYNSTYRVVSVLTVLHQDWLNGKEYKCKVSNKALGAPIEKTISKAKGQPREPQVYTLPPSRDELTKNQVSLTCLVKGFYPSDIAVEWESNGQPENNYKTTPPVLDSDGSFFLYSKLTVDKSRWQQGNVFSCSVMHEALHNHYTQKSLSLSPGK

SEQ ID NO: 110 - protein, 380 aa, Artificial Sequence
  source: /note="Description of Artificial Sequence: Synthetic polypeptide"
APTSSSTKKTQLQLEHLLLDLQMILNGINNYKNPKLTQMLTFKFYMPKKATELKHLQCLEEELKPLEEALNLAPSKNFHLRPRDLISNINVIVLELKGSETTFMCEYADETATIVEFLNRWITFSQSIISTLTGGGGSGGGGSGGGGSGGGGSDKTHTCPPCPAPEAAGGPSVFLFPPKPKDTLMISRTPEVTCVVVDVSHEDPEVKFNWYVDGVEVHNAKTKPREEQYNSTYRVVSVLTVLHQDWLNGKEYKCKVSNKALGAPIEKTISKAKGQPREPQVYTLPPSRDELTKNQVSLTCLVKGFYPSDIAVEWESNGQPENNYKTTPPVLDSDGSFFLYSKLTVDKSRWQQGNVFSCSVMHEALHNHYTQKSLSLSPGK

SEQ ID NO: 111 - protein, 380 aa, Artificial Sequence
  source: /note="Description of Artificial Sequence: Synthetic polypeptide"
APTSSSTKKTQLQLENLLLDLQMILNGINNYKNPKLTQMLTFKFYMPKKATELKHLQCLEEELKPLEEALNLAPSKNFHLRPRDLISNINVIVLELKGSETTFMCEYADETATIVEFLNRWITFSQSIISTLTGGGGSGGGGSGGGGSGGGGSDKTHTCPPCPAPEAAGGPSVFLFPPKPKDTLMISRTPEVTCVVVDVSHEDPEVKFNWYVDGVEVHNAKTKPREEQYNSTYRVVSVLTVLHQDWLNGKEYKCKVSNKALGAPIEKTISKAKGQPREPQVYTLPPSRDELTKNQVSLTCLVKGFYPSDIAVEWESNGQPENNYKTTPPVLDSDGSFFLYSKLTVDKSRWQQGNVFSCSVMHEALHNHYTQKSLSLSPGK

SEQ ID NO: 112 - protein, 380 aa, Artificial Sequence
  source: /note="Description of Artificial Sequence: Synthetic polypeptide"
APTSSSTKKTQLQLELLLLDLQMILNGINNYKNPKLTQMLTFKFYMPKKATELKHLQCLEEELKPLEEALNLAPSKNFHLRPRDLISNINVIVLELKGSETTFMCEYADETATIVEFLNRWITFSQSIISTLTGGGGSGGGGSGGGGSGGGGSDKTHTCPPCPAPEAAGGPSVFLFPPKPKDTLMISRTPEVTCVVVDVSHEDPEVKFNWYVDGVEVHNAKTKPREEQYNSTYRVVSVLTVLHQDWLNGKEYKCKVSNKALGAPIEKTISKAKGQPREPQVYTLPPSRDELTKNQVSLTCLVKGFYPSDIAVEWESNGQPENNYKTTPPVLDSDGSFFLYSKLTVDKSRWQQGNVFSCSVMHEALHNHYTQKSLSLSPGK

SEQ ID NO: 113 - protein, 380 aa, Artificial Sequence
  source: /note="Description of Artificial Sequence: Synthetic polypeptide"
APTSSSTKKTQLQLEHLLLDLQMILNGINNYKNPKLTQMLTFKFYMPKKATELKHLQCLEEELKPLEEALNLAPSKNFHLRPRVLISNINVIVLELKGSETTFMCEYADETATIVEFLNRWITFSQSIISTLTGGGGSGGGGSGGGGSGGGGSDKTHTCPPCPAPEAAGGPSVFLFPPKPKDTLMISRTPEVTCVVVDVSHEDPEVKFNWYVDGVEVHNAKTKPREEQYNSTYRVVSVLTVLHQDWLNGKEYKCKVSNKALGAPIEKTISKAKGQPREPQVYTLPPSRDELTKNQVSLTCLVKGFYPSDIAVEWESNGQPENNYKTTPPVLDSDGSFFLYSKLTVDKSRWQQGNVFSCSVMHEALHNHYTQKSLSLSPGK

SEQ ID NO: 114 - protein, 380 aa, Artificial Sequence
  source: /note="Description of Artificial Sequence: Synthetic polypeptide"
APTSSSTKKTQLQLEHLLLDLQMILNGINNYKNPKLTQMLTFKFYMPKKATELKHLQCLEEELKPLEEALNLAPSKNFHLRPRDLISNINVSVLELKGSETTFMCEYADETATIVEFLNRWITFSQSIISTLTGGGGSGGGGSGGGGSGGGGSDKTHTCPPCPAPEAAGGPSVFLFPPKPKDTLMISRTPEVTCVVVDVSHEDPEVKFNWYVDGVEVHNAKTKPREEQYNSTYRVVSVLTVLHQDWLNGKEYKCKVSNKALGAPIEKTISKAKGQPREPQVYTLPPSRDELTKNQVSLTCLVKGFYPSDIAVEWESNGQPENNYKTTPPVLDSDGSFFLYSKLTVDKSRWQQGNVFSCSVMHEALHNHYTQKSLSLSPGK

SEQ ID NO: 115 - protein, 380 aa, Artificial Sequence
  source: /note="Description of Artificial Sequence: Synthetic polypeptide"
APTSSSTKKTQLQLEHLLLDLQMILNGINNYKNPKLTNMLTFKFYMPKKATELKHLQCLEEELKPLEEALNLAPSKNFHLRPRDLISNINVIVLELKGSETTFMCEYADETATIVEFLNRWITFSQSIISTLTGGGGSGGGGSGGGGSGGGGSDKTHTCPPCPAPEAAGGPSVFLFPPKPKDTLMISRTPEVTCVVVDVSHEDPEVKFNWYVDGVEVHNAKTKPREEQYNSTYRVVSVLTVLHQDWLNGKEYKCKVSNKALGAPIEKTISKAKGQPREPQVYTLPPSRDELTKNQVSLTCLVKGFYPSDIAVEWESNGQPENNYKTTPPVLDSDGSFFLYSKLTVDKSRWQQGNVFSCSVMHEALHNHYTQKSLSLSPGK

SEQ ID NO: 116 - protein, 380 aa, Artificial Sequence
  source: /note="Description of Artificial Sequence: Synthetic polypeptide"
APTSSSTKKTQLQLENLLLDLQMILNGINNYKNPKLTNMLTFKFYMPKKATELKHLQCLEEELKPLEEALNLAPSKNFHLRPRDLISNINVIVLELKGSETTFMCEYADETATIVEFLNRWITFSQSIISTLTGGGGSGGGGSGGGGSGGGGSDKTHTCPPCPAPEAAGGPSVFLFPPKPKDTLMISRTPEVTCVVVDVSHEDPEVKFNWYVDGVEVHNAKTKPREEQYNSTYRVVSVLTVLHQDWLNGKEYKCKVSNKALGAPIEKTISKAKGQPREPQVYTLPPSRDELTKNQVSLTCLVKGFYPSDIAVEWESNGQPENNYKTTPPVLDSDGSFFLYSKLTVDKSRWQQGNVFSCSVMHEALHNHYTQKSLSLSPGK

SEQ ID NO: 117 - protein, 380 aa, Artificial Sequence
  source: /note="Description of Artificial Sequence: Synthetic polypeptide"
APTSSSTKKTQLQLELLLLDLQMILNGINNYKNPKLTNMLTFKFYMPKKATELKHLQCLEEELKPLEEALNLAPSKNFHLRPRDLISNINVIVLELKGSETTFMCEYADETATIVEFLNRWITFSQSIISTLTGGGGSGGGGSGGGGSGGGGSDKTHTCPPCPAPEAAGGPSVFLFPPKPKDTLMISRTPEVTCVVVDVSHEDPEVKFNWYVDGVEVHNAKTKPREEQYNSTYRVVSVLTVLHQDWLNGKEYKCKVSNKALGAPIEKTISKAKGQPREPQVYTLPPSRDELTKNQVSLTCLVKGFYPSDIAVEWESNGQPENNYKTTPPVLDSDGSFFLYSKLTVDKSRWQQGNVFSCSVMHEALHNHYTQKSLSLSPGK

SEQ ID NO: 118 - protein, 380 aa, Artificial Sequence
  source: /note="Description of Artificial Sequence: Synthetic polypeptide"
APTSSSTKKTQLQLEHLLLDLQMILNGINNYKNPKLTNMLTFKFYMPKKATELKHLQCLEEELKPLEEALNLAPSKNFHLRPRVLISNINVIVLELKGSETTFMCEYADETATIVEFLNRWITFSQSIISTLTGGGGSGGGGSGGGGSGGGGSDKTHTCPPCPAPEAAGGPSVFLFPPKPKDTLMISRTPEVTCVVVDVSHEDPEVKFNWYVDGVEVHNAKTKPREEQYNSTYRVVSVLTVLHQDWLNGKEYKCKVSNKALGAPIEKTISKAKGQPREPQVYTLPPSRDELTKNQVSLTCLVKGFYPSDIAVEWESNGQPENNYKTTPPVLDSDGSFFLYSKLTVDKSRWQQGNVFSCSVMHEALHNHYTQKSLSLSPGK

SEQ ID NO: 119 - protein, 380 aa, Artificial Sequence
  source: /note="Description of Artificial Sequence: Synthetic polypeptide"
APTSSSTKKTQLQLEHLLLDLQMILNGINNYKNPKLTNMLTFKFYMPKKATELKHLQCLEEELKPLEEALNLAPSKNFHLRPRDLISNINVSVLELKGSETTFMCEYADETATIVEFLNRWITFSQSIISTLTGGGGSGGGGSGGGGSGGGGSDKTHTCPPCPAPEAAGGPSVFLFPPKPKDTLMISRTPEVTCVVVDVSHEDPEVKFNWYVDGVEVHNAKTKPREEQYNSTYRVVSVLTVLHQDWLNGKEYKCKVSNKALGAPIEKTISKAKGQPREPQVYTLPPSRDELTKNQVSLTCLVKGFYPSDIAVEWESNGQPENNYKTTPPVLDSDGSFFLYSKLTVDKSRWQQGNVFSCSVMHEALHNHYTQKSLSLSPGK

SEQ ID NO: 120 - protein, 380 aa, Artificial Sequence
  source: /note="Description of Artificial Sequence: Synthetic polypeptide"
APTSSSTKKTQLQLEHLLLDLQMILNGINNYKNPKLTEMLTFKFYMPKKATELKHLQCLEEELKPLEEALNLAPSKNFHLRPRDLISNINVIVLELKGSETTFMCEYADETATIVEFLNRWITFSQSIISTLTGGGGSGGGGSGGGGSGGGGSDKTHTCPPCPAPEAAGGPSVFLFPPKPKDTLMISRTPEVTCVVVDVSHEDPEVKFNWYVDGVEVHNAKTKPREEQYNSTYRVVSVLTVLHQDWLNGKEYKCKVSNKALGAPIEKTISKAKGQPREPQVYTLPPSRDELTKNQVSLTCLVKGFYPSDIAVEWESNGQPENNYKTTPPVLDSDGSFFLYSKLTVDKSRWQQGNVFSCSVMHEALHNHYTQKSLSLSPGK

SEQ ID NO: 121 - protein, 380 aa, Artificial Sequence
  source: /note="Description of Artificial Sequence: Synthetic polypeptide"
APTSSSTKKTQLQLEHLLLDLQMILNGINNYKNPKLTRMLTKKFYMPKKATELKHLQCLEEELKPLEEALNLAPSKNFHLRPRDLISNINVIVLELKGSETTFMCEYADETATIVEFLNRWITFSQSIISTLTGGGGSGGGGSGGGGSGGGGSDKTHTCPPCPAPEAAGGPSVFLFPPKPKDTLMISRTPEVTCVVVDVSHEDPEVKFNWYVDGVEVHNAKTKPREEQYNSTYRVVSVLTVLHQDWLNGKEYKCKVSNKALGAPIEKTISKAKGQPREPQVYTLPPSRDELTKNQVSLTCLVKGFYPSDIAVEWESNGQPENNYKTTPPVLDSDGSFFLYSKLTVDKSRWQQGNVFSCSVMHEALHNHYTQKSLSLSPGK

SEQ ID NO: 122 - protein, 380 aa, Artificial Sequence
  source: /note="Description of Artificial Sequence: Synthetic polypeptide"
APTSSSTKKTQLQLEHLLLDLQMILNGINNYKNPKLTRMLTQKFYMPKKATELKHLQCLEEELKPLEEALNLAPSKNFHLRPRDLISNINVIVLELKGSETTFMCEYADETATIVEFLNRWITFSQSIISTLTGGGGSGGGGSGGGGSGGGGSDKTHTCPPCPAPEAAGGPSVFLFPPKPKDTLMISRTPEVTCVVVDVSHEDPEVKFNWYVDGVEVHNAKTKPREEQYNSTYRVVSVLTVLHQDWLNGKEYKCKVSNKALGAPIEKTISKAKGQPREPQVYTLPPSRDELTKNQVSLTCLVKGFYPSDIAVEWESNGQPENNYKTTPPVLDSDGSFFLYSKLTVDKSRWQQGNVFSCSVMHEALHNHYTQKSLSLSPGK

SEQ ID NO: 123 - protein, 380 aa, Artificial Sequence
  source: /note="Description of Artificial Sequence: Synthetic polypeptide"
APTSSSTKKTQLQLEHLLLDLQMILNGINNYKNPKLTRMLTAKFAMPKKATELKHLQCLEEELKPLEEALNGAPSKNFHLRPRDLISDINVIVLELKGSETTFMCEYADETATIVEFLNRWITFSQSIISTLTGGGGSGGGGSGGGGSGGGGSDKTHTCPPCPAPEAAGGPSVFLFPPKPKDTLMISRTPEVTCVVVDVSHEDPEVKFNWYVDGVEVHNAKTKPREEQYNSTYRVVSVLTVLHQDWLNGKEYKCKVSNKALGAPIEKTISKAKGQPREPQVYTLPPSRDELTKNQVSLTCLVKGFYPSDIAVEWESNGQPENNYKTTPPVLDSDGSFFLYSKLTVDKSRWQQGNVFSCSVMHEALHNHYTQKSLSLSPGK

SEQ ID NO: 124 - protein, 380 aa, Artificial Sequence
  source: /note="Description of Artificial Sequence: Synthetic polypeptide"
APTSSSTKKTQLQLEHLLLDLQMILNGINNYKNPKLTNMLTFKFYMPKKATELKHLQCLEEELKPLEEALNLAPSKNFHLRPRDLIRNINVIVLELKGSETTFMCEYADETATIVEFLNRWITFSQSIISTLTGGGGSGGGGSGGGGSGGGGSDKTHTCPPCPAPEAAGGPSVFLFPPKPKDTLMISRTPEVTCVVVDVSHEDPEVKFNWYVDGVEVHNAKTKPREEQYNSTYRVVSVLTVLHQDWLNGKEYKCKVSNKALGAPIEKTISKAKGQPREPQVYTLPPSRDELTKNQVSLTCLVKGFYPSDIAVEWESNGQPENNYKTTPPVLDSDGSFFLYSKLTVDKSRWQQGNVFSCSVMHEALHNHYTQKSLSLSPGK

SEQ ID NO: 125 - protein, 380 aa, Artificial Sequence
  source: /note="Description of Artificial Sequence: Synthetic polypeptide"
APTSSSTKKTQLQLENLLLDLQMILNGINNYKNPKLTEMLTFKFYMPKKATELKHLQCLEEELKPLEEALNLAPSKNFHLRPRDLISNINVIVLELKGSETTFMCEYADETATIVEFLNRWITFSQSIISTLTGGGGSGGGGSGGGGSGGGGSDKTHTCPPCPAPEAAGGPSVFLFPPKPKDTLMISRTPEVTCVVVDVSHEDPEVKFNWYVDGVEVHNAKTKPREEQYNSTYRVVSVLTVLHQDWLNGKEYKCKVSNKALGAPIEKTISKAKGQPREPQVYTLPPSRDELTKNQVSLTCLVKGFYPSDIAVEWESNGQPENNYKTTPPVLDSDGSFFLYSKLTVDKSRWQQGNVFSCSVMHEALHNHYTQKSLSLSPGK

SEQ ID NO: 126 - protein, 380 aa, Artificial Sequence
  source: /note="Description of Artificial Sequence: Synthetic polypeptide"
APTSSSTKKTQLQLEHLLLDLQMILNGINNYKNPKLTEMLTFKFYMPKKATELKHLQCLEEELKPLEEALNLAPSKNFHLRPRVLISNINVIVLELKGSETTFMCEYADETATIVEFLNRWITFSQSIISTLTGGGGSGGGGSGGGGSGGGGSDKTHTCPPCPAPEAAGGPSVFLFPPKPKDTLMISRTPEVTCVVVDVSHEDPEVKFNWYVDGVEVHNAKTKPREEQYNSTYRVVSVLTVLHQDWLNGKEYKCKVSNKALGAPIEKTISKAKGQPREPQVYTLPPSRDELTKNQVSLTCLVKGFYPSDIAVEWESNGQPENNYKTTPPVLDSDGSFFLYSKLTVDKSRWQQGNVFSCSVMHEALHNHYTQKSLSLSPGK

SEQ ID NO: 127 - protein, 380 aa, Artificial Sequence
  source: /note="Description of Artificial Sequence: Synthetic polypeptide"
APTSSSTKKTQLQLEHLLLDLQMILNGINNYKNPKLTEMLTFKFYMPKKATELKHLQCLEEELKPLEEALNLAPSKNFHLRPRDLIRNINVIVLELKGSETTFMCEYADETATIVEFLNRWITFSQSIISTLTGGGGSGGGGSGGGGSGGGGSDKTHTCPPCPAPEAAGGPSVFLFPPKPKDTLMISRTPEVTCVVVDVSHEDPEVKFNWYVDGVEVHNAKTKPREEQYNSTYRVVSVLTVLHQDWLNGKEYKCKVSNKALGAPIEKTISKAKGQPREPQVYTLPPSRDELTKNQVSLTCLVKGFYPSDIAVEWESNGQPENNYKTTPPVLDSDGSFFLYSKLTVDKSRWQQGNVFSCSVMHEALHNHYTQKSLSLSPGK

SEQ ID NO: 128 - protein, 380 aa, Artificial Sequence
  source: /note="Description of Artificial Sequence: Synthetic polypeptide"
APTSSSTKKTQLQLEHLLLDLQMILNGINNYKNPKLTEMLTFKFYMPKKATELKHLQCLEEELKPLEEALNLAPSKNFHLRPRDLISNINVSVLELKGSETTFMCEYADETATIVEFLNRWITFSQSIISTLTGGGGSGGGGSGGGGSGGGGSDKTHTCPPCPAPEAAGGPSVFLFPPKPKDTLMISRTPEVTCVVVDVSHEDPEVKFNWYVDGVEVHNAKTKPREEQYNSTYRVVSVLTVLHQDWLNGKEYKCKVSNKALGAPIEKTISKAKGQPREPQVYTLPPSRDELTKNQVSLTCLVKGFYPSDIAVEWESNGQPENNYKTTPPVLDSDGSFFLYSKLTVDKSRWQQGNVFSCSVMHEALHNHYTQKSLSLSPGK

SEQ ID NO: 129 - protein, 380 aa, Artificial Sequence
  source: /note="Description of Artificial Sequence: Synthetic polypeptide"
APTSSSTKKTQLQLENLLLDLQMILNGINNYKNPKLTRMLTQKFYMPKKATELKHLQCLEEELKPLEEALNLAPSKNFHLRPRDLISNINVIVLELKGSETTFMCEYADETATIVEFLNRWITFSQSIISTLTGGGGSGGGGSGGGGSGGGGSDKTHTCPPCPAPEAAGGPSVFLFPPKPKDTLMISRTPEVTCVVVDVSHEDPEVKFNWYVDGVEVHNAKTKPREEQYNSTYRVVSVLTVLHQDWLNGKEYKCKVSNKALGAPIEKTISKAKGQPREPQVYTLPPSRDELTKNQVSLTCLVKGFYPSDIAVEWESNGQPENNYKTTPPVLDSDGSFFLYSKLTVDKSRWQQGNVFSCSVMHEALHNHYTQKSLSLSPGK

SEQ ID NO: 130 - protein, 380 aa, Artificial Sequence
  source: /note="Description of Artificial Sequence: Synthetic polypeptide"
APTSSSTKKTQLQLEHLLLDLQMILNGINNYKNPKLTRMLTQKFYMPKKATELKHLQCLEEELKPLEEALNLAPSKNFHLRPRDLISNINVSVLELKGSETTFMCEYADETATIVEFLNRWITFSQSIISTLTGGGGSGGGGSGGGGSGGGGSDKTHTCPPCPAPEAAGGPSVFLFPPKPKDTLMISRTPEVTCVVVDVSHEDPEVKFNWYVDGVEVHNAKTKPREEQYNSTYRVVSVLTVLHQDWLNGKEYKCKVSNKALGAPIEKTISKAKGQPREPQVYTLPPSRDELTKNQVSLTCLVKGFYPSDIAVEWESNGQPENNYKTTPPVLDSDGSFFLYSKLTVDKSRWQQGNVFSCSVMHEALHNHYTQKSLSLSPGK

SEQ ID NO: 131 - protein, 380 aa, Artificial Sequence
  source: /note="Description of Artificial Sequence: Synthetic polypeptide"
APTSSSTKKTQLQLENLLLDLQMILNGINNYKNPELTNMLTFKFYMPKKATELKHLQCLEEELKPLEEALNLAPSKNFHLRPRDLISNINVIVLELKGSETTFMCEYADETATIVEFLNRWITFSQSIISTLTGGGGSGGGGSGGGGSGGGGSDKTHTCPPCPAPEAAGGPSVFLFPPKPKDTLMISRTPEVTCVVVDVSHEDPEVKFNWYVDGVEVHNAKTKPREEQYNSTYRVVSVLTVLHQDWLNGKEYKCKVSNKALGAPIEKTISKAKGQPREPQVYTLPPSRDELTKNQVSLTCLVKGFYPSDIAVEWESNGQPENNYKTTPPVLDSDGSFFLYSKLTVDKSRWQQGNVFSCSVMHEALHNHYTQKSLSLSPGK

SEQ ID NO: 132 - protein, 380 aa, Artificial Sequence
  source: /note="Description of Artificial Sequence: Synthetic polypeptide"
APTSSSTKKTQLQLEHLLLDLQMILNGINNYKNPKLTRMLTFKFYMPKKATELKHLQCLEEELKPLEEVLNLAQSKNFHLRPRDLISNINVIVLELKGSETTFMCEYADETATIVEFLNRWITFSQSIISTLTGGGGSGGGGSGGGGSGGGGSDKTHTCPPCPAPELLGGPSVFLFPPKPKDTLMISRTPEVTCVVVDVSHEDPEVKFNWYVDGVEVHNAKTKPREEQYGSTYRVVSVLQVLHVDWLNGKEYKCKVSNKALPAPIEKTISKAKGQPREPQVYTLPPSRDELTKNQVSLTCLVKGFYPSDIVVEWESNGQPENNYKTTPPVLDSDGSFFLYSKLTVDKSRWQQGNVFSCSVMHEALHNHYTQKSLSLSPGK

SEQ ID NO: 133 - protein, 380 aa, Artificial Sequence
  source: /note="Description of Artificial Sequence: Synthetic polypeptide"
APTSSSTKKTQLQLEHLLLDLQMILNGINNYKNPKLTRMLTFKFYMPKKATELKHLQCLEEELKPLEEALNLAPSKNFHLRPRDLISNINVIVLELKGSETTFMCEYADETATIVEFLNRWITFSQSIISTLTGGGGSGGGGSGGGGSGGGGSDKTHTCPPCPAPELLGGPSVFLFPPKPKDTLMISRTPEVTCVVVDVSHEDPEVKFNWYVDGVEVHNAKTKPREEQYGSTYRVVSVLQVLHVDWLNGKEYKCKVSNKALPAPIEKTISKAKGQPREPQVYTLPPSRDELTKNQVSLTCLVKGFYPSDIVVEWESNGQPENNYKTTPPVLDSDGSFFLYSKLTVDKSRWQQGNVFSCSVMHEALHNHYTQKSLSLSPGK

SEQ ID NO: 134 - protein, 380 aa, Artificial Sequence
  source: /note="Description of Artificial Sequence: Synthetic polypeptide"
APTSSSTKKTQLQLEDLLLDLQMILNGINNYKNPKLTRMLTFKFYMPKKATELKHLQCLEEELKPLEEALNLAPSKNFHLRPRDLISNINVIVLELKGSETTFMCEYADETATIVEFLNRWITFSQSIISTLTGGGGSGGGGSGGGGSGGGGSDKTHTCPPCPAPELLGGPSVFLFPPKPKDTLMISRTPEVTCVVVDVSHEDPEVKFNWYVDGVEVHNAKTKPREEQYGSTYRVVSVLQVLHVDWLNGKEYKCKVSNKALPAPIEKTISKAKGQPREPQVYTLPPSRDELTKNQVSLTCLVKGFYPSDIVVEWESNGQPENNYKTTPPVLDSDGSFFLYSKLTVDKSRWQQGNVFSCSVMHEALHNHYTQKSLSLSPGK

SEQ ID NO: 135 - protein, 380 aa, Artificial Sequence
  source: /note="Description of Artificial Sequence: Synthetic polypeptide"
APTSSSTKKTQLQLENLLLDLQMILNGINNYKNPKLTRMLTFKFYMPKKATELKHLQCLEEELKPLEEALNLAPSKNFHLRPRDLISNINVIVLELKGSETTFMCEYADETATIVEFLNRWITFSQSIISTLTGGGGSGGGGSGGGGSGGGGSDKTHTCPPCPAPELLGGPSVFLFPPKPKDTLMISRTPEVTCVVVDVSHEDPEVKFNWYVDGVEVHNAKTKPREEQYGSTYRVVSVLQVLHVDWLNGKEYKCKVSNKALPAPIEKTISKAKGQPREPQVYTLPPSRDELTKNQVSLTCLVKGFYPSDIVVEWESNGQPENNYKTTPPVLDSDGSFFLYSKLTVDKSRWQQGNVFSCSVMHEALHNHYTQKSLSLSPGK

SEQ ID NO: 136 - protein, 380 aa, Artificial Sequence
  source: /note="Description of Artificial Sequence: Synthetic polypeptide"
APTSSSTKKTQLQLELLLLDLQMILNGINNYKNPKLTRMLTFKFYMPKKATELKHLQCLEEELKPLEEALNLAPSKNFHLRPRDLISNINVIVLELKGSETTFMCEYADETATIVEFLNRWITFSQSIISTLTGGGGSGGGGSGGGGSGGGGSDKTHTCPPCPAPELLGGPSVFLFPPKPKDTLMISRTPEVTCVVVDVSHEDPEVKFNWYVDGVEVHNAKTKPREEQYGSTYRVVSVLQVLHVDWLNGKEYKCKVSNKALPAPIEKTISKAKGQPREPQVYTLPPSRDELTKNQVSLTCLVKGFYPSDIVVEWESNGQPENNYKTTPPVLDSDGSFFLYSKLTVDKSRWQQGNVFSCSVMHEALHNHYTQKSLSLSPGK

SEQ ID NO: 137 - protein, 380 aa, Artificial Sequence
  source: /note="Description of Artificial Sequence: Synthetic polypeptide"
APTSSSTKKTQLQLEHLLLDLQMILNGTNNYKNPKLTRMLTFKFYMPKKATELKHLQCLEEELKPLEEALNLAPSKNFHLRPRDLISNINVIVLELKGSETTFMCEYADETATIVEFLNRWITFSQSIISTLTGGGGSGGGGSGGGGSGGGGSDKTHTCPPCPAPELLGGPSVFLFPPKPKDTLMISRTPEVTCVVVDVSHEDPEVKFNWYVDGVEVHNAKTKPREEQYGSTYRVVSVLQVLHVDWLNGKEYKCKVSNKALPAPIEKTISKAKGQPREPQVYTLPPSRDELTKNQVSLTCLVKGFYPSDIVVEWESNGQPENNYKTTPPVLDSDGSFFLYSKLTVDKSRWQQGNVFSCSVMHEALHNHYTQKSLSLSPGK

SEQ ID NO: 138 - protein, 380 aa, Artificial Sequence
  source: /note="Description of Artificial Sequence: Synthetic polypeptide"
APTSSSTKKTQLQLEHLLLDLQMILNGINNYKNPKLTRMLTFKFYMPKKATELKHLQCLEEELKPLEEALNLAPSKNFHLRPRVLISNINVIVLELKGSETTFMCEYADETATIVEFLNRWITFSQSIISTLTGGGGSGGGGSGGGGSGGGGSDKTHTCPPCPAPELLGGPSVFLFPPKPKDTLMISRTPEVTCVVVDVSHEDPEVKFNWYVDGVEVHNAKTKPREEQYGSTYRVVSVLQVLHVDWLNGKEYKCKVSNKALPAPIEKTISKAKGQPREPQVYTLPPSRDELTKNQVSLTCLVKGFYPSDIVVEWESNGQPENNYKTTPPVLDSDGSFFLYSKLTVDKSRWQQGNVFSCSVMHEALHNHYTQKSLSLSPGK

SEQ ID NO: 139 - protein, 380 aa, Artificial Sequence
  source: /note="Description of Artificial Sequence: Synthetic polypeptide"
APTSSSTKKTQLQLEHLLLDLQMILNGINNYKNPKLTRMLTFKFYMPKKATELKHLQCLEEELKPLEEALNLAPSKNFHLRPRDLIRNINVIVLELKGSETTFMCEYADETATIVEFLNRWITFSQSIISTLTGGGGSGGGGSGGGGSGGGGSDKTHTCPPCPAPELLGGPSVFLFPPKPKDTLMISRTPEVTCVVVDVSHEDPEVKFNWYVDGVEVHNAKTKPREEQYGSTYRVVSVLQVLHVDWLNGKEYKCKVSNKALPAPIEKTISKAKGQPREPQVYTLPPSRDELTKNQVSLTCLVKGFYPSDIVVEWESNGQPENNYKTTPPVLDSDGSFFLYSKLTVDKSRWQQGNVFSCSVMHEALHNHYTQKSLSLSPGK

SEQ ID NO: 140 - protein, 380 aa, Artificial Sequence
  source: /note="Description of Artificial Sequence: Synthetic polypeptide"
APTSSSTKKTQLQLEHLLLDLQMILNGINNYKNPKLTRMLTFKFYMPKKATELKHLQCLEEELKPLEEALNLAPSKNFHLRPRDLISLINVIVLELKGSETTFMCEYADETATIVEFLNRWITFSQSIISTLTGGGGSGGGGSGGGGSGGGGSDKTHTCPPCPAPELLGGPSVFLFPPKPKDTLMISRTPEVTCVVVDVSHEDPEVKFNWYVDGVEVHNAKTKPREEQYGSTYRVVSVLQVLHVDWLNGKEYKCKVSNKALPAPIEKTISKAKGQPREPQVYTLPPSRDELTKNQVSLTCLVKGFYPSDIVVEWESNGQPENNYKTTPPVLDSDGSFFLYSKLTVDKSRWQQGNVFSCSVMHEALHNHYTQKSLSLSPGK

SEQ ID NO: 141 - protein, 380 aa, Artificial Sequence
  source: /note="Description of Artificial Sequence: Synthetic polypeptide"
APTSSSTKKTQLQLEHLLLDLQMILNGINNYKNPKLTRMLTFKFYMPKKATELKHLQCLEEELKPLEEALNLAPSKNFHLRPRDLISSINVIVLELKGSETTFMCEYADETATIVEFLNRWITFSQSIISTLTGGGGSGGGGSGGGGSGGGGSDKTHTCPPCPAPELLGGPSVFLFPPKPKDTLMISRTPEVTCVVVDVSHEDPEVKFNWYVDGVEVHNAKTKPREEQYGSTYRVVSVLQVLHVDWLNGKEYKCKVSNKALPAPIEKTISKAKGQPREPQVYTLPPSRDELTKNQVSLTCLVKGFYPSDIVVEWESNGQPENNYKTTPPVLDSDGSFFLYSKLTVDKSRWQQGNVFSCSVMHEALHNHYTQKSLSLSPGK

SEQ ID NO: 142 - protein, 380 aa, Artificial Sequence
  source: /note="Description of Artificial Sequence: Synthetic polypeptide"
APTSSSTKKTQLQLEHLLLDLQMILNGINNYKNPKLTRMLTFKFYMPKKATELKHLQCLEEELKPLEEALNLAPSKNFHLRPRDLISNINVSVLELKGSETTFMCEYADETATIVEFLNRWITFSQSIISTLTGGGGSGGGGSGGGGSGGGGSDKTHTCPPCPAPELLGGPSVFLFPPKPKDTLMISRTPEVTCVVVDVSHEDPEVKFNWYVDGVEVHNAKTKPREEQYGSTYRVVSVLQVLHVDWLNGKEYKCKVSNKALPAPIEKTISKAKGQPREPQVYTLPPSRDELTKNQVSLTCLVKGFYPSDIVVEWESNGQPENNYKTTPPVLDSDGSFFLYSKLTVDKSRWQQGNVFSCSVMHEALHNHYTQKSLSLSPGK

SEQ ID NO: 143 - protein, 380 aa, Artificial Sequence
  source: /note="Description of Artificial Sequence: Synthetic polypeptide"
APTSSSTKKTQLQLEHLLLDLQMILNGINNYKNPELTRMLTFKFYMPKKATELKHLQCLEEELKPLEEALNLAPSKNFHLRPRDLISNINVIVLELKGSETTFMCEYADETATIVEFLNRWITFSQSIISTLTGGGGSGGGGSGGGGSGGGGSDKTHTCPPCPAPELLGGPSVFLFPPKPKDTLMISRTPEVTCVVVDVSHEDPEVKFNWYVDGVEVHNAKTKPREEQYGSTYRVVSVLQVLHVDWLNGKEYKCKVSNKALPAPIEKTISKAKGQPREPQVYTLPPSRDELTKNQVSLTCLVKGFYPSDIVVEWESNGQPENNYKTTPPVLDSDGSFFLYSKLTVDKSRWQQGNVFSCSVMHEALHNHYTQKSLSLSPGK

SEQ ID NO: 144 - protein, 380 aa, Artificial Sequence
  source: /note="Description of Artificial Sequence: Synthetic polypeptide"
APTSSSTKKTQLQLENLLLDLQMILNGINNYKNPELTRMLTFKFYMPKKATELKHLQCLEEELKPLEEALNLAPSKNFHLRPRDLISNINVIVLELKGSETTFMCEYADETATIVEFLNRWITFSQSIISTLTGGGGSGGGGSGGGGSGGGGSDKTHTCPPCPAPELLGGPSVFLFPPKPKDTLMISRTPEVTCVVVDVSHEDPEVKFNWYVDGVEVHNAKTKPREEQYGSTYRVVSVLQVLHVDWLNGKEYKCKVSNKALPAPIEKTISKAKGQPREPQVYTLPPSRDELTKNQVSLTCLVKGFYPSDIVVEWESNGQPENNYKTTPPVLDSDGSFFLYSKLTVDKSRWQQGNVFSCSVMHEALHNHYTQKSLSLSPGK

SEQ ID NO: 145 - protein, 380 aa, Artificial Sequence
  source: /note="Description of Artificial Sequence: Synthetic polypeptide"
APTSSSTKKTQLQLELLLLDLQMILNGINNYKNPELTRMLTFKFYMPKKATELKHLQCLEEELKPLEEALNLAPSKNFHLRPRDLISNINVIVLELKGSETTFMCEYADETATIVEFLNRWITFSQSIISTLTGGGGSGGGGSGGGGSGGGGSDKTHTCPPCPAPELLGGPSVFLFPPKPKDTLMISRTPEVTCVVVDVSHEDPEVKFNWYVDGVEVHNAKTKPREEQYGSTYRVVSVLQVLHVDWLNGKEYKCKVSNKALPAPIEKTISKAKGQPREPQVYTLPPSRDELTKNQVSLTCLVKGFYPSDIVVEWESNGQPENNYKTTPPVLDSDGSFFLYSKLTVDKSRWQQGNVFSCSVMHEALHNHYTQKSLSLSPGK

SEQ ID NO: 146 - protein, 380 aa, Artificial Sequence
  source: /note="Description of Artificial Sequence: Synthetic polypeptide"
APTSSSTKKTQLQLEHLLLDLQMILNGINNYKNPELTRMLTFKFYMPKKATELKHLQCLEEELKPLEEALNLAPSKNFHLRPRVLISNINVIVLELKGSETTFMCEYADETATIVEFLNRWITFSQSIISTLTGGGGSGGGGSGGGGSGGGGSDKTHTCPPCPAPELLGGPSVFLFPPKPKDTLMISRTPEVTCVVVDVSHEDPEVKFNWYVDGVEVHNAKTKPREEQYGSTYRVVSVLQVLHVDWLNGKEYKCKVSNKALPAPIEKTISKAKGQPREPQVYTLPPSRDELTKNQVSLTCLVKGFYPSDIVVEWESNGQPENNYKTTPPVLDSDGSFFLYSKLTVDKSRWQQGNVFSCSVMHEALHNHYTQKSLSLSPGK

SEQ ID NO: 147 - protein, 380 aa, Artificial Sequence
  source: /note="Description of Artificial Sequence: Synthetic polypeptide"
APTSSSTKKTQLQLEHLLLDLQMILNGINNYKNPELTRMLTFKFYMPKKATELKHLQCLEEELKPLEEALNLAPSKNFHLRPRDLISNINVSVLELKGSETTFMCEYADETATIVEFLNRWITFSQSIISTLTGGGGSGGGGSGGGGSGGGGSDKTHTCPPCPAPELLGGPSVFLFPPKPKDTLMISRTPEVTCVVVDVSHEDPEVKFNWYVDGVEVHNAKTKPREEQYGSTYRVVSVLQVLHVDWLNGKEYKCKVSNKALPAPIEKTISKAKGQPREPQVYTLPPSRDELTKNQVSLTCLVKGFYPSDIVVEWESNGQPENNYKTTPPVLDSDGSFFLYSKLTVDKSRWQQGNVFSCSVMHEALHNHYTQKSLSLSPGK

SEQ ID NO: 148 - protein, 380 aa, Artificial Sequence
  source: /note="Description of Artificial Sequence: Synthetic polypeptide"
APTSSSTKKTQLQLEHLLLDLQMILNGINNYKNPKLTQMLTFKFYMPKKATELKHLQCLEEELKPLEEALNLAPSKNFHLRPRDLISNINVIVLELKGSETTFMCEYADETATIVEFLNRWITFSQSIISTLTGGGGSGGGGSGGGGSGGGGSDKTHTCPPCPAPELLGGPSVFLFPPKPKDTLMISRTPEVTCVVVDVSHEDPEVKFNWYVDGVEVHNAKTKPREEQYGSTYRVVSVLQVLHVDWLNGKEYKCKVSNKALPAPIEKTISKAKGQPREPQVYTLPPSRDELTKNQVSLTCLVKGFYPSDIVVEWESNGQPENNYKTTPPVLDSDGSFFLYSKLTVDKSRWQQGNVFSCSVMHEALHNHYTQKSLSLSPGK

SEQ ID NO: 149 - protein, 380 aa, Artificial Sequence
  source: /note="Description of Artificial Sequence: Synthetic polypeptide"
APTSSSTKKTQLQLENLLLDLQMILNGINNYKNPKLTQMLTFKFYMPKKATELKHLQCLEEELKPLEEALNLAPSKNFHLRPRDLISNINVIVLELKGSETTFMCEYADETATIVEFLNRWITFSQSIISTLTGGGGSGGGGSGGGGSGGGGSDKTHTCPPCPAPELLGGPSVFLFPPKPKDTLMISRTPEVTCVVVDVSHEDPEVKFNWYVDGVEVHNAKTKPREEQYGSTYRVVSVLQVLHVDWLNGKEYKCKVSNKALPAPIEKTISKAKGQPREPQVYTLPPSRDELTKNQVSLTCLVKGFYPSDIVVEWESNGQPENNYKTTPPVLDSDGSFFLYSKLTVDKSRWQQGNVFSCSVMHEALHNHYTQKSLSLSPGK

SEQ ID NO: 150 - protein, 380 aa, Artificial Sequence
  source: /note="Description of Artificial Sequence: Synthetic polypeptide"
APTSSSTKKTQLQLELLLLDLQMILNGINNYKNPKLTQMLTFKFYMPKKATELKHLQCLEEELKPLEEALNLAPSKNFHLRPRDLISNINVIVLELKGSETTFMCEYADETATIVEFLNRWITFSQSIISTLTGGGGSGGGGSGGGGSGGGGSDKTHTCPPCPAPELLGGPSVFLFPPKPKDTLMISRTPEVTCVVVDVSHEDPEVKFNWYVDGVEVHNAKTKPREEQYGSTYRVVSVLQVLHVDWLNGKEYKCKVSNKALPAPIEKTISKAKGQPREPQVYTLPPSRDELTKNQVSLTCLVKGFYPSDIVVEWESNGQPENNYKTTPPVLDSDGSFFLYSKLTVDKSRWQQGNVFSCSVMHEALHNHYTQKSLSLSPGK

SEQ ID NO: 151 - protein, 380 aa, Artificial Sequence
  source: /note="Description of Artificial Sequence: Synthetic polypeptide"
APTSSSTKKTQLQLEHLLLDLQMILNGINNYKNPKLTQMLTFKFYMPKKATELKHLQCLEEELKPLEEALNLAPSKNFHLRPRVLISNINVIVLELKGSETTFMCEYADETATIVEFLNRWITFSQSIISTLTGGGGSGGGGSGGGGSGGGGSDKTHTCPPCPAPELLGGPSVFLFPPKPKDTLMISRTPEVTCVVVDVSHEDPEVKFNWYVDGVEVHNAKTKPREEQYGSTYRVVSVLQVLHVDWLNGKEYKCKVSNKALPAPIEKTISKAKGQPREPQVYTLPPSRDELTKNQVSLTCLVKGFYPSDIVVEWESNGQPENNYKTTPPVLDSDGSFFLYSKLTVDKSRWQQGNVFSCSVMHEALHNHYTQKSLSLSPGK

SEQ ID NO: 152 - protein, 380 aa, Artificial Sequence
  source: /note="Description of Artificial Sequence: Synthetic polypeptide"
APTSSSTKKTQLQLEHLLLDLQMILNGINNYKNPKLTQMLTFKFYMPKKATELKHLQCLEEELKPLEEALNLAPSKNFHLRPRDLISNINVSVLELKGSETTFMCEYADETATIVEFLNRWITFSQSIISTLTGGGGSGGGGSGGGGSGGGGSDKTHTCPPCPAPELLGGPSVFLFPPKPKDTLMISRTPEVTCVVVDVSHEDPEVKFNWYVDGVEVHNAKTKPREEQYGSTYRVVSVLQVLHVDWLNGKEYKCKVSNKALPAPIEKTISKAKGQPREPQVYTLPPSRDELTKNQVSLTCLVKGFYPSDIVVEWESNGQPENNYKTTPPVLDSDGSFFLYSKLTVDKSRWQQGNVFSCSVMHEALHNHYTQKSLSLSPGK

SEQ ID NO: 153 - protein, 380 aa, Artificial Sequence
  source: /note="Description of Artificial Sequence: Synthetic polypeptide"
APTSSSTKKTQLQLEHLLLDLQMILNGINNYKNPKLTNMLTFKFYMPKKATELKHLQCLEEELKPLEEALNLAPSKNFHLRPRDLISNINVIVLELKGSETTFMCEYADETATIVEFLNRWITFSQSIISTLTGGGGSGGGGSGGGGSGGGGSDKTHTCPPCPAPELLGGPSVFLFPPKPKDTLMISRTPEVTCVVVDVSHEDPEVKFNWYVDGVEVHNAKTKPREEQYGSTYRVVSVLQVLHVDWLNGKEYKCKVSNKALPAPIEKTISKAKGQPREPQVYTLPPSRDELTKNQVSLTCLVKGFYPSDIVVEWESNGQPENNYKTTPPVLDSDGSFFLYSKLTVDKSRWQQGNVFSCSVMHEALHNHYTQKSLSLSPGK

SEQ ID NO: 154 - protein, 380 aa, Artificial Sequence
  source: /note="Description of Artificial Sequence: Synthetic polypeptide"
APTSSSTKKTQLQLENLLLDLQMILNGINNYKNPKLTNMLTFKFYMPKKATELKHLQCLEEELKPLEEALNLAPSKNFHLRPRDLISNINVIVLELKGSETTFMCEYADETATIVEFLNRWITFSQSIISTLTGGGGSGGGGSGGGGSGGGGSDKTHTCPPCPAPELLGGPSVFLFPPKPKDTLMISRTPEVTCVVVDVSHEDPEVKFNWYVDGVEVHNAKTKPREEQYGSTYRVVSVLQVLHVDWLNGKEYKCKVSNKALPAPIEKTISKAKGQPREPQVYTLPPSRDELTKNQVSLTCLVKGFYPSDIVVEWESNGQPENNYKTTPPVLDSDGSFFLYSKLTVDKSRWQQGNVFSCSVMHEALHNHYTQKSLSLSPGK

SEQ ID NO: 155 - protein, 380 aa, Artificial Sequence
  source: /note="Description of Artificial Sequence: Synthetic polypeptide"
APTSSSTKKTQLQLELLLLDLQMILNGINNYKNPKLTNMLTFKFYMPKKATELKHLQCLEEELKPLEEALNLAPSKNFHLRPRDLISNINVIVLELKGSETTFMCEYADETATIVEFLNRWITFSQSIISTLTGGGGSGGGGSGGGGSGGGGSDKTHTCPPCPAPELLGGPSVFLFPPKPKDTLMISRTPEVTCVVVDVSHEDPEVKFNWYVDGVEVHNAKTKPREEQYGSTYRVVSVLQVLHVDWLNGKEYKCKVSNKALPAPIEKTISKAKGQPREPQVYTLPPSRDELTKNQVSLTCLVKGFYPSDIVVEWESNGQPENNYKTTPPVLDSDGSFFLYSKLTVDKSRWQQGNVFSCSVMHEALHNHYTQKSLSLSPGK

SEQ ID NO: 156 - protein, 380 aa, Artificial Sequence
  source: /note="Description of Artificial Sequence: Synthetic polypeptide"
APTSSSTKKTQLQLEHLLLDLQMILNGINNYKNPKLTNMLTFKFYMPKKATELKHLQCLEEELKPLEEALNLAPSKNFHLRPRVLISNINVIVLELKGSETTFMCEYADETATIVEFLNRWITFSQSIISTLTGGGGSGGGGSGGGGSGGGGSDKTHTCPPCPAPELLGGPSVFLFPPKPKDTLMISRTPEVTCVVVDVSHEDPEVKFNWYVDGVEVHNAKTKPREEQYGSTYRVVSVLQVLHVDWLNGKEYKCKVSNKALPAPIEKTISKAKGQPREPQVYTLPPSRDELTKNQVSLTCLVKGFYPSDIVVEWESNGQPENNYKTTPPVLDSDGSFFLYSKLTVDKSRWQQGNVFSCSVMHEALHNHYTQKSLSLSPGK

SEQ ID NO: 157 - protein, 380 aa, Artificial Sequence
  source: /note="Description of Artificial Sequence: Synthetic polypeptide"
APTSSSTKKTQLQLEHLLLDLQMILNGINNYKNPKLTNMLTFKFYMPKKATELKHLQCLEEELKPLEEALNLAPSKNFHLRPRDLISNINVSVLELKGSETTFMCEYADETATIVEFLNRWITFSQSIISTLTGGGGSGGGGSGGGGSGGGGSDKTHTCPPCPAPELLGGPSVFLFPPKPKDTLMISRTPEVTCVVVDVSHEDPEVKFNWYVDGVEVHNAKTKPREEQYGSTYRVVSVLQVLHVDWLNGKEYKCKVSNKALPAPIEKTISKAKGQPREPQVYTLPPSRDELTKNQVSLTCLVKGFYPSDIVVEWESNGQPENNYKTTPPVLDSDGSFFLYSKLTVDKSRWQQGNVFSCSVMHEALHNHYTQKSLSLSPGK

SEQ ID NO: 158 - protein, 380 aa, Artificial Sequence
  source: /note="Description of Artificial Sequence: Synthetic polypeptide"
APTSSSTKKTQLQLEHLLLDLQMILNGINNYKNPKLTEMLTFKFYMPKKATELKHLQCLEEELKPLEEALNLAPSKNFHLRPRDLISNINVIVLELKGSETTFMCEYADETATIVEFLNRWITFSQSIISTLTGGGGSGGGGSGGGGSGGGGSDKTHTCPPCPAPELLGGPSVFLFPPKPKDTLMISRTPEVTCVVVDVSHEDPEVKFNWYVDGVEVHNAKTKPREEQYGSTYRVVSVLQVLHVDWLNGKEYKCKVSNKALPAPIEKTISKAKGQPREPQVYTLPPSRDELTKNQVSLTCLVKGFYPSDIVVEWESNGQPENNYKTTPPVLDSDGSFFLYSKLTVDKSRWQQGNVFSCSVMHEALHNHYTQKSLSLSPGK

SEQ ID NO: 159 - protein, 380 aa, Artificial Sequence
  source: /note="Description of Artificial Sequence: Synthetic polypeptide"
APTSSSTKKTQLQLEHLLLDLQMILNGINNYKNPKLTRMLTKKFYMPKKATELKHLQCLEEELKPLEEALNLAPSKNFHLRPRDLISNINVIVLELKGSETTFMCEYADETATIVEFLNRWITFSQSIISTLTGGGGSGGGGSGGGGSGGGGSDKTHTCPPCPAPELLGGPSVFLFPPKPKDTLMISRTPEVTCVVVDVSHEDPEVKFNWYVDGVEVHNAKTKPREEQYGSTYRVVSVLQVLHVDWLNGKEYKCKVSNKALPAPIEKTISKAKGQPREPQVYTLPPSRDELTKNQVSLTCLVKGFYPSDIVVEWESNGQPENNYKTTPPVLDSDGSFFLYSKLTVDKSRWQQGNVFSCSVMHEALHNHYTQKSLSLSPGK

SEQ ID NO: 160 - protein, 380 aa, Artificial Sequence
  source: /note="Description of Artificial Sequence: Synthetic polypeptide"
APTSSSTKKTQLQLEHLLLDLQMILNGINNYKNPKLTRMLTQKFYMPKKATELKHLQCLEEELKPLEEALNLAPSKNFHLRPRDLISNINVIVLELKGSETTFMCEYADETATIVEFLNRWITFSQSIISTLTGGGGSGGGGSGGGGSGGGGSDKTHTCPPCPAPELLGGPSVFLFPPKPKDTLMISRTPEVTCVVVDVSHEDPEVKFNWYVDGVEVHNAKTKPREEQYGSTYRVVSVLQVLHVDWLNGKEYKCKVSNKALPAPIEKTISKAKGQPREPQVYTLPPSRDELTKNQVSLTCLVKGFYPSDIVVEWESNGQPENNYKTTPPVLDSDGSFFLYSKLTVDKSRWQQGNVFSCSVMHEALHNHYTQKSLSLSPGK

SEQ ID NO: 161 - protein, 380 aa, Artificial Sequence
  source: /note="Description of Artificial Sequence: Synthetic polypeptide"
APTSSSTKKTQLQLEHLLLDLQMILNGINNYKNPKLTRMLTAKFAMPKKATELKHLQCLEEELKPLEEALNGAPSKNFHLRPRDLISDINVIVLELKGSETTFMCEYADETATIVEFLNRWITFSQSIISTLTGGGGSGGGGSGGGGSGGGGSDKTHTCPPCPAPELLGGPSVFLFPPKPKDTLMISRTPEVTCVVVDVSHEDPEVKFNWYVDGVEVHNAKTKPREEQYGSTYRVVSVLQVLHVDWLNGKEYKCKVSNKALPAPIEKTISKAKGQPREPQVYTLPPSRDELTKNQVSLTCLVKGFYPSDIVVEWESNGQPENNYKTTPPVLDSDGSFFLYSKLTVDKSRWQQGNVFSCSVMHEALHNHYTQKSLSLSPGK

SEQ ID NO: 162 - protein, 380 aa, Artificial Sequence
  source: /note="Description of Artificial Sequence: Synthetic polypeptide"
APTSSSTKKTQLQLEHLLLDLQMILNGINNYKNPKLTNMLTFKFYMPKKATELKHLQCLEEELKPLEEALNLAPSKNFHLRPRDLIRNINVIVLELKGSETTFMCEYADETATIVEFLNRWITFSQSIISTLTGGGGSGGGGSGGGGSGGGGSDKTHTCPPCPAPELLGGPSVFLFPPKPKDTLMISRTPEVTCVVVDVSHEDPEVKFNWYVDGVEVHNAKTKPREEQYGSTYRVVSVLQVLHVDWLNGKEYKCKVSNKALPAPIEKTISKAKGQPREPQVYTLPPSRDELTKNQVSLTCLVKGFYPSDIVVEWESNGQPENNYKTTPPVLDSDGSFFLYSKLTVDKSRWQQGNVFSCSVMHEALHNHYTQKSLSLSPGK

SEQ ID NO: 163 - protein, 380 aa, Artificial Sequence
  source: /note="Description of Artificial Sequence: Synthetic polypeptide"
APTSSSTKKTQLQLENLLLDLQMILNGINNYKNPKLTEMLTFKFYMPKKATELKHLQCLEEELKPLEEALNLAPSKNFHLRPRDLISNINVIVLELKGSETTFMCEYADETATIVEFLNRWITFSQSIISTLTGGGGSGGGGSGGGGSGGGGSDKTHTCPPCPAPELLGGPSVFLFPPKPKDTLMISRTPEVTCVVVDVSHEDPEVKFNWYVDGVEVHNAKTKPREEQYGSTYRVVSVLQVLHVDWLNGKEYKCKVSNKALPAPIEKTISKAKGQPREPQVYTLPPSRDELTKNQVSLTCLVKGFYPSDIVVEWESNGQPENNYKTTPPVLDSDGSFFLYSKLTVDKSRWQQGNVFSCSVMHEALHNHYTQKSLSLSPGK

SEQ ID NO: 164 - protein, 380 aa, Artificial Sequence
  source: /note="Description of Artificial Sequence: Synthetic polypeptide"
APTSSSTKKTQLQLEHLLLDLQMILNGINNYKNPKLTEMLTFKFYMPKKATELKHLQCLEEELKPLEEALNLAPSKNFHLRPRVLISNINVIVLELKGSETTFMCEYADETATIVEFLNRWITFSQSIISTLTGGGGSGGGGSGGGGSGGGGSDKTHTCPPCPAPELLGGPSVFLFPPKPKDTLMISRTPEVTCVVVDVSHEDPEVKFNWYVDGVEVHNAKTKPREEQYGSTYRVVSVLQVLHVDWLNGKEYKCKVSNKALPAPIEKTISKAKGQPREPQVYTLPPSRDELTKNQVSLTCLVKGFYPSDIVVEWESNGQPENNYKTTPPVLDSDGSFFLYSKLTVDKSRWQQGNVFSCSVMHEALHNHYTQKSLSLSPGK

SEQ ID NO: 165 - protein, 380 aa, Artificial Sequence
  source: /note="Description of Artificial Sequence: Synthetic polypeptide"
APTSSSTKKTQLQLEHLLLDLQMILNGINNYKNPKLTEMLTFKFYMPKKATELKHLQCLEEELKPLEEALNLAPSKNFHLRPRDLIRNINVIVLELKGSETTFMCEYADETATIVEFLNRWITFSQSIISTLTGGGGSGGGGSGGGGSGGGGSDKTHTCPPCPAPELLGGPSVFLFPPKPKDTLMISRTPEVTCVVVDVSHEDPEVKFNWYVDGVEVHNAKTKPREEQYGSTYRVVSVLQVLHVDWLNGKEYKCKVSNKALPAPIEKTISKAKGQPREPQVYTLPPSRDELTKNQVSLTCLVKGFYPSDIVVEWESNGQPENNYKTTPPVLDSDGSFFLYSKLTVDKSRWQQGNVFSCSVMHEALHNHYTQKSLSLSPGK

SEQ ID NO: 166 - protein, 380 aa, Artificial Sequence
  source: /note="Description of Artificial Sequence: Synthetic polypeptide"
APTSSSTKKTQLQLEHLLLDLQMILNGINNYKNPKLTEMLTFKFYMPKKATELKHLQCLEEELKPLEEALNLAPSKNFHLRPRDLISNINVSVLELKGSETTFMCEYADETATIVEFLNRWITFSQSIISTLTGGGGSGGGGSGGGGSGGGGSDKTHTCPPCPAPELLGGPSVFLFPPKPKDTLMISRTPEVTCVVVDVSHEDPEVKFNWYVDGVEVHNAKTKPREEQYGSTYRVVSVLQVLHVDWLNGKEYKCKVSNKALPAPIEKTISKAKGQPREPQVYTLPPSRDELTKNQVSLTCLVKGFYPSDIVVEWESNGQPENNYKTTPPVLDSDGSFFLYSKLTVDKSRWQQGNVFSCSVMHEALHNHYTQKSLSLSPGK

SEQ ID NO: 167 - protein, 380 aa, Artificial Sequence
  source: /note="Description of Artificial Sequence: Synthetic polypeptide"
APTSSSTKKTQLQLENLLLDLQMILNGINNYKNPKLTRMLTQKFYMPKKATELKHLQCLEEELKPLEEALNLAPSKNFHLRPRDLISNINVIVLELKGSETTFMCEYADETATIVEFLNRWITFSQSIISTLTGGGGSGGGGSGGGGSGGGGSDKTHTCPPCPAPELLGGPSVFLFPPKPKDTLMISRTPEVTCVVVDVSHEDPEVKFNWYVDGVEVHNAKTKPREEQYGSTYRVVSVLQVLHVDWLNGKEYKCKVSNKALPAPIEKTISKAKGQPREPQVYTLPPSRDELTKNQVSLTCLVKGFYPSDIVVEWESNGQPENNYKTTPPVLDSDGSFFLYSKLTVDKSRWQQGNVFSCSVMHEALHNHYTQKSLSLSPGK

SEQ ID NO: 168 - protein, 380 aa, Artificial Sequence
  source: /note="Description of Artificial Sequence: Synthetic polypeptide"
APTSSSTKKTQLQLEHLLLDLQMILNGINNYKNPKLTRMLTQKFYMPKKATELKHLQCLEEELKPLEEALNLAPSKNFHLRPRDLISNINVSVLELKGSETTFMCEYADETATIVEFLNRWITFSQSIISTLTGGGGSGGGGSGGGGSGGGGSDKTHTCPPCPAPELLGGPSVFLFPPKPKDTLMISRTPEVTCVVVDVSHEDPEVKFNWYVDGVEVHNAKTKPREEQYGSTYRVVSVLQVLHVDWLNGKEYKCKVSNKALPAPIEKTISKAKGQPREPQVYTLPPSRDELTKNQVSLTCLVKGFYPSDIVVEWESNGQPENNYKTTPPVLDSDGSFFLYSKLTVDKSRWQQGNVFSCSVMHEALHNHYTQKSLSLSPGK

SEQ ID NO: 169 - protein, 380 aa, Artificial Sequence
  source: /note="Description of Artificial Sequence: Synthetic polypeptide"
APTSSSTKKTQLQLENLLLDLQMILNGINNYKNPELTNMLTFKFYMPKKATELKHLQCLEEELKPLEEALNLAPSKNFHLRPRDLISNINVIVLELKGSETTFMCEYADETATIVEFLNRWITFSQSIISTLTGGGGSGGGGSGGGGSGGGGSDKTHTCPPCPAPELLGGPSVFLFPPKPKDTLMISRTPEVTCVVVDVSHEDPEVKFNWYVDGVEVHNAKTKPREEQYGSTYRVVSVLQVLHVDWLNGKEYKCKVSNKALPAPIEKTISKAKGQPREPQVYTLPPSRDELTKNQVSLTCLVKGFYPSDIVVEWESNGQPENNYKTTPPVLDSDGSFFLYSKLTVDKSRWQQGNVFSCSVMHEALHNHYTQKSLSLSPGK

SEQ ID NO: 170 - protein, 380 aa, Artificial Sequence
  source: /note="Description of Artificial Sequence: Synthetic polypeptide"
APTSSSTKKTQLQLEHLLLDLQMILNGINNYKNPKLTRMLTFKFYMPKKATELKHLQCLEEELKPLEEVLNLAQSKNFHLRPRDLISNINVIVLELKGSETTFMCEYADETATIVEFLNRWITFSQSIISTLTGGGGSGGGGSGGGGSGGGGSDKTHTCPPCPAPEAAGGPSVFLFPPKPKDTLMISRTPEVTCVVVDVSHEDPEVKFNWYVDGVEVHNAKTKPREEQYNSTYRVVSVLQVLHVDWLNGKEYKCKVSNKALGAPIEKTISKAKGQPREPQVYTLPPSRDELTKNQVSLTCLVKGFYPSDIVVEWESNGQPENNYKTTPPVLDSDGSFFLYSKLTVDKSRWQQGNVFSCSVMHEALHNHYTQKSLSLSPGK

SEQ ID NO: 171 - protein, 380 aa, Artificial Sequence
  source: /note="Description of Artificial Sequence: Synthetic polypeptide"
APTSSSTKKTQLQLEHLLLDLQMILNGINNYKNPKLTRMLTFKFYMPKKATELKHLQCLEEELKPLEEALNLAPSKNFHLRPRDLISNINVIVLELKGSETTFMCEYADETATIVEFLNRWITFSQSIISTLTGGGGSGGGGSGGGGSGGGGSDKTHTCPPCPAPEAAGGPSVFLFPPKPKDTLMISRTPEVTCVVVDVSHEDPEVKFNWYVDGVEVHNAKTKPREEQYNSTYRVVSVLQVLHVDWLNGKEYKCKVSNKALGAPIEKTISKAKGQPREPQVYTLPPSRDELTKNQVSLTCLVKGFYPSDIVVEWESNGQPENNYKTTPPVLDSDGSFFLYSKLTVDKSRWQQGNVFSCSVMHEALHNHYTQKSLSLSPGK

SEQ ID NO: 172 - protein, 380 aa, Artificial Sequence
  source: /note="Description of Artificial Sequence: Synthetic polypeptide"
APTSSSTKKTQLQLEDLLLDLQMILNGINNYKNPKLTRMLTFKFYMPKKATELKHLQCLEEELKPLEEALNLAPSKNFHLRPRDLISNINVIVLELKGSETTFMCEYADETATIVEFLNRWITFSQSIISTLTGGGGSGGGGSGGGGSGGGGSDKTHTCPPCPAPEAAGGPSVFLFPPKPKDTLMISRTPEVTCVVVDVSHEDPEVKFNWYVDGVEVHNAKTKPREEQYNSTYRVVSVLQVLHVDWLNGKEYKCKVSNKALGAPIEKTISKAKGQPREPQVYTLPPSRDELTKNQVSLTCLVKGFYPSDIVVEWESNGQPENNYKTTPPVLDSDGSFFLYSKLTVDKSRWQQGNVFSCSVMHEALHNHYTQKSLSLSPGK

SEQ ID NO: 173 - protein, 380 aa, Artificial Sequence
  source: /note="Description of Artificial Sequence: Synthetic polypeptide"
APTSSSTKKTQLQLENLLLDLQMILNGINNYKNPKLTRMLTFKFYMPKKATELKHLQCLEEELKPLEEALNLAPSKNFHLRPRDLISNINVIVLELKGSETTFMCEYADETATIVEFLNRWITFSQSIISTLTGGGGSGGGGSGGGGSGGGGSDKTHTCPPCPAPEAAGGPSVFLFPPKPKDTLMISRTPEVTCVVVDVSHEDPEVKFNWYVDGVEVHNAKTKPREEQYNSTYRVVSVLQVLHVDWLNGKEYKCKVSNKALGAPIEKTISKAKGQPREPQVYTLPPSRDELTKNQVSLTCLVKGFYPSDIVVEWESNGQPENNYKTTPPVLDSDGSFFLYSKLTVDKSRWQQGNVFSCSVMHEALHNHYTQKSLSLSPGK

SEQ ID NO: 174 - protein, 380 aa, Artificial Sequence
  source: /note="Description of Artificial Sequence: Synthetic polypeptide"
APTSSSTKKTQLQLELLLLDLQMILNGINNYKNPKLTRMLTFKFYMPKKATELKHLQCLEEELKPLEEALNLAPSKNFHLRPRDLISNINVIVLELKGSETTFMCEYADETATIVEFLNRWITFSQSIISTLTGGGGSGGGGSGGGGSGGGGSDKTHTCPPCPAPEAAGGPSVFLFPPKPKDTLMISRTPEVTCVVVDVSHEDPEVKFNWYVDGVEVHNAKTKPREEQYNSTYRVVSVLQVLHVDWLNGKEYKCKVSNKALGAPIEKTISKAKGQPREPQVYTLPPSRDELTKNQVSLTCLVKGFYPSDIVVEWESNGQPENNYKTTPPVLDSDGSFFLYSKLTVDKSRWQQGNVFSCSVMHEALHNHYTQKSLSLSPGK

SEQ ID NO: 175 - protein, 380 aa, Artificial Sequence
  source: /note="Description of Artificial Sequence: Synthetic polypeptide"
APTSSSTKKTQLQLEHLLLDLQMILNGTNNYKNPKLTRMLTFKFYMPKKATELKHLQCLEEELKPLEEALNLAPSKNFHLRPRDLISNINVIVLELKGSETTFMCEYADETATIVEFLNRWITFSQSIISTLTGGGGSGGGGSGGGGSGGGGSDKTHTCPPCPAPEAAGGPSVFLFPPKPKDTLMISRTPEVTCVVVDVSHEDPEVKFNWYVDGVEVHNAKTKPREEQYNSTYRVVSVLQVLHVDWLNGKEYKCKVSNKALGAPIEKTISKAKGQPREPQVYTLPPSRDELTKNQVSLTCLVKGFYPSDIVVEWESNGQPENNYKTTPPVLDSDGSFFLYSKLTVDKSRWQQGNVFSCSVMHEALHNHYTQKSLSLSPGK

SEQ ID NO: 176 - protein, 380 aa, Artificial Sequence
  source: /note="Description of Artificial Sequence: Synthetic polypeptide"
APTSSSTKKTQLQLEHLLLDLQMILNGINNYKNPKLTRMLTFKFYMPKKATELKHLQCLEEELKPLEEALNLAPSKNFHLRPRVLISNINVIVLELKGSETTFMCEYADETATIVEFLNRWITFSQSIISTLTGGGGSGGGGSGGGGSGGGGSDKTHTCPPCPAPEAAGGPSVFLFPPKPKDTLMISRTPEVTCVVVDVSHEDPEVKFNWYVDGVEVHNAKTKPREEQYNSTYRVVSVLQVLHVDWLNGKEYKCKVSNKALGAPIEKTISKAKGQPREPQVYTLPPSRDELTKNQVSLTCLVKGFYPSDIVVEWESNGQPENNYKTTPPVLDSDGSFFLYSKLTVDKSRWQQGNVFSCSVMHEALHNHYTQKSLSLSPGK

SEQ ID NO: 177 - protein, 380 aa, Artificial Sequence
  source: /note="Description of Artificial Sequence: Synthetic polypeptide"
APTSSSTKKTQLQLEHLLLDLQMILNGINNYKNPKLTRMLTFKFYMPKKATELKHLQCLEEELKPLEEALNLAPSKNFHLRPRDLIRNINVIVLELKGSETTFMCEYADETATIVEFLNRWITFSQSIISTLTGGGGSGGGGSGGGGSGGGGSDKTHTCPPCPAPEAAGGPSVFLFPPKPKDTLMISRTPEVTCVVVDVSHEDPEVKFNWYVDGVEVHNAKTKPREEQYNSTYRVVSVLQVLHVDWLNGKEYKCKVSNKALGAPIEKTISKAKGQPREPQVYTLPPSRDELTKNQVSLTCLVKGFYPSDIVVEWESNGQPENNYKTTPPVLDSDGSFFLYSKLTVDKSRWQQGNVFSCSVMHEALHNHYTQKSLSLSPGK

SEQ ID NO: 178 - protein, 380 aa, Artificial Sequence
  source: /note="Description of Artificial Sequence: Synthetic polypeptide"
APTSSSTKKTQLQLEHLLLDLQMILNGINNYKNPKLTRMLTFKFYMPKKATELKHLQCLEEELKPLEEALNLAPSKNFHLRPRDLISLINVIVLELKGSETTFMCEYADETATIVEFLNRWITFSQSIISTLTGGGGSGGGGSGGGGSGGGGSDKTHTCPPCPAPEAAGGPSVFLFPPKPKDTLMISRTPEVTCVVVDVSHEDPEVKFNWYVDGVEVHNAKTKPREEQYNSTYRVVSVLQVLHVDWLNGKEYKCKVSNKALGAPIEKTISKAKGQPREPQVYTLPPSRDELTKNQVSLTCLVKGFYPSDIVVEWESNGQPENNYKTTPPVLDSDGSFFLYSKLTVDKSRWQQGNVFSCSVMHEALHNHYTQKSLSLSPGK

SEQ ID NO: 179 - protein, 380 aa, Artificial Sequence
  source: /note="Description of Artificial Sequence: Synthetic polypeptide"
APTSSSTKKTQLQLEHLLLDLQMILNGINNYKNPKLTRMLTFKFYMPKKATELKHLQCLEEELKPLEEALNLAPSKNFHLRPRDLISSINVIVLELKGSETTFMCEYADETATIVEFLNRWITFSQSIISTLTGGGGSGGGGSGGGGSGGGGSDKTHTCPPCPAPEAAGGPSVFLFPPKPKDTLMISRTPEVTCVVVDVSHEDPEVKFNWYVDGVEVHNAKTKPREEQYNSTYRVVSVLQVLHVDWLNGKEYKCKVSNKALGAPIEKTISKAKGQPREPQVYTLPPSRDELTKNQVSLTCLVKGFYPSDIVVEWESNGQPENNYKTTPPVLDSDGSFFLYSKLTVDKSRWQQGNVFSCSVMHEALHNHYTQKSLSLSPGK

SEQ ID NO: 180 - protein, 380 aa, Artificial Sequence
  source: /note="Description of Artificial Sequence: Synthetic polypeptide"
APTSSSTKKTQLQLEHLLLDLQMILNGINNYKNPKLTRMLTFKFYMPKKATELKHLQCLEEELKPLEEALNLAPSKNFHLRPRDLISNINVSVLELKGSETTFMCEYADETATIVEFLNRWITFSQSIISTLTGGGGSGGGGSGGGGSGGGGSDKTHTCPPCPAPEAAGGPSVFLFPPKPKDTLMISRTPEVTCVVVDVSHEDPEVKFNWYVDGVEVHNAKTKPREEQYNSTYRVVSVLQVLHVDWLNGKEYKCKVSNKALGAPIEKTISKAKGQPREPQVYTLPPSRDELTKNQVSLTCLVKGFYPSDIVVEWESNGQPENNYKTTPPVLDSDGSFFLYSKLTVDKSRWQQGNVFSCSVMHEALHNHYTQKSLSLSPGK

SEQ ID NO: 181 - protein, 380 aa, Artificial Sequence
  source: /note="Description of Artificial Sequence: Synthetic polypeptide"
APTSSSTKKTQLQLEHLLLDLQMILNGINNYKNPELTRMLTFKFYMPKKATELKHLQCLEEELKPLEEALNLAPSKNFHLRPRDLISNINVIVLELKGSETTFMCEYADETATIVEFLNRWITFSQSIISTLTGGGGSGGGGSGGGGSGGGGSDKTHTCPPCPAPEAAGGPSVFLFPPKPKDTLMISRTPEVTCVVVDVSHEDPEVKFNWYVDGVEVHNAKTKPREEQYNSTYRVVSVLQVLHVDWLNGKEYKCKVSNKALGAPIEKTISKAKGQPREPQVYTLPPSRDELTKNQVSLTCLVKGFYPSDIVVEWESNGQPENNYKTTPPVLDSDGSFFLYSKLTVDKSRWQQGNVFSCSVMHEALHNHYTQKSLSLSPGK

SEQ ID NO: 182 - protein, 380 aa, Artificial Sequence
  source: /note="Description of Artificial Sequence: Synthetic polypeptide"
APTSSSTKKTQLQLENLLLDLQMILNGINNYKNPELTRMLTFKFYMPKKATELKHLQCLEEELKPLEEALNLAPSKNFHLRPRDLISNINVIVLELKGSETTFMCEYADETATIVEFLNRWITFSQSIISTLTGGGGSGGGGSGGGGSGGGGSDKTHTCPPCPAPEAAGGPSVFLFPPKPKDTLMISRTPEVTCVVVDVSHEDPEVKFNWYVDGVEVHNAKTKPREEQYNSTYRVVSVLQVLHVDWLNGKEYKCKVSNKALGAPIEKTISKAKGQPREPQVYTLPPSRDELTKNQVSLTCLVKGFYPSDIVVEWESNGQPENNYKTTPPVLDSDGSFFLYSKLTVDKSRWQQGNVFSCSVMHEALHNHYTQKSLSLSPGK

SEQ ID NO: 183 - protein, 380 aa, Artificial Sequence
  source: /note="Description of Artificial Sequence: Synthetic polypeptide"
APTSSSTKKTQLQLELLLLDLQMILNGINNYKNPELTRMLTFKFYMPKKATELKHLQCLEEELKPLEEALNLAPSKNFHLRPRDLISNINVIVLELKGSETTFMCEYADETATIVEFLNRWITFSQSIISTLTGGGGSGGGGSGGGGSGGGGSDKTHTCPPCPAPEAAGGPSVFLFPPKPKDTLMISRTPEVTCVVVDVSHEDPEVKFNWYVDGVEVHNAKTKPREEQYNSTYRVVSVLQVLHVDWLNGKEYKCKVSNKALGAPIEKTISKAKGQPREPQVYTLPPSRDELTKNQVSLTCLVKGFYPSDIVVEWESNGQPENNYKTTPPVLDSDGSFFLYSKLTVDKSRWQQGNVFSCSVMHEALHNHYTQKSLSLSPGK

SEQ ID NO: 184 - protein, 380 aa, Artificial Sequence
  source: /note="Description of Artificial Sequence: Synthetic polypeptide"
APTSSSTKKTQLQLEHLLLDLQMILNGINNYKNPELTRMLTFKFYMPKKATELKHLQCLEEELKPLEEALNLAPSKNFHLRPRVLISNINVIVLELKGSETTFMCEYADETATIVEFLNRWITFSQSIISTLTGGGGSGGGGSGGGGSGGGGSDKTHTCPPCPAPEAAGGPSVFLFPPKPKDTLMISRTPEVTCVVVDVSHEDPEVKFNWYVDGVEVHNAKTKPREEQYNSTYRVVSVLQVLHVDWLNGKEYKCKVSNKALGAPIEKTISKAKGQPREPQVYTLPPSRDELTKNQVSLTCLVKGFYPSDIVVEWESNGQPENNYKTTPPVLDSDGSFFLYSKLTVDKSRWQQGNVFSCSVMHEALHNHYTQKSLSLSPGK

SEQ ID NO: 185 - protein, 380 aa, Artificial Sequence
  source: /note="Description of Artificial Sequence: Synthetic polypeptide"
APTSSSTKKTQLQLEHLLLDLQMILNGINNYKNPELTRMLTFKFYMPKKATELKHLQCLEEELKPLEEALNLAPSKNFHLRPRDLISNINVSVLELKGSETTFMCEYADETATIVEFLNRWITFSQSIISTLTGGGGSGGGGSGGGGSGGGGSDKTHTCPPCPAPEAAGGPSVFLFPPKPKDTLMISRTPEVTCVVVDVSHEDPEVKFNWYVDGVEVHNAKTKPREEQYNSTYRVVSVLQVLHVDWLNGKEYKCKVSNKALGAPIEKTISKAKGQPREPQVYTLPPSRDELTKNQVSLTCLVKGFYPSDIVVEWESNGQPENNYKTTPPVLDSDGSFFLYSKLTVDKSRWQQGNVFSCSVMHEALHNHYTQKSLSLSPGK

SEQ ID NO: 186 - protein, 380 aa, Artificial Sequence
  source: /note="Description of Artificial Sequence: Synthetic polypeptide"
APTSSSTKKTQLQLEHLLLDLQMILNGINNYKNPKLTQMLTFKFYMPKKATELKHLQCLEEELKPLEEALNLAPSKNFHLRPRDLISNINVIVLELKGSETTFMCEYADETATIVEFLNRWITFSQSIISTLTGGGGSGGGGSGGGGSGGGGSDKTHTCPPCPAPEAAGGPSVFLFPPKPKDTLMISRTPEVTCVVVDVSHEDPEVKFNWYVDGVEVHNAKTKPREEQYNSTYRVVSVLQVLHVDWLNGKEYKCKVSNKALGAPIEKTISKAKGQPREPQVYTLPPSRDELTKNQVSLTCLVKGFYPSDIVVEWESNGQPENNYKTTPPVLDSDGSFFLYSKLTVDKSRWQQGNVFSCSVMHEALHNHYTQKSLSLSPGK

SEQ ID NO: 187 - protein, 380 aa, Artificial Sequence
  source: /note="Description of Artificial Sequence: Synthetic polypeptide"
APTSSSTKKTQLQLENLLLDLQMILNGINNYKNPKLTQMLTFKFYMPKKATELKHLQCLEEELKPLEEALNLAPSKNFHLRPRDLISNINVIVLELKGSETTFMCEYADETATIVEFLNRWITFSQSIISTLTGGGGSGGGGSGGGGSGGGGSDKTHTCPPCPAPEAAGGPSVFLFPPKPKDTLMISRTPEVTCVVVDVSHEDPEVKFNWYVDGVEVHNAKTKPREEQYNSTYRVVSVLQVLHVDWLNGKEYKCKVSNKALGAPIEKTISKAKGQPREPQVYTLPPSRDELTKNQVSLTCLVKGFYPSDIVVEWESNGQPENNYKTTPPVLDSDGSFFLYSKLTVDKSRWQQGNVFSCSVMHEALHNHYTQKSLSLSPGK

SEQ ID NO: 188 - protein, 380 aa, Artificial Sequence
  source: /note="Description of Artificial Sequence: Synthetic polypeptide"
APTSSSTKKTQLQLELLLLDLQMILNGINNYKNPKLTQMLTFKFYMPKKATELKHLQCLEEELKPLEEALNLAPSKNFHLRPRDLISNINVIVLELKGSETTFMCEYADETATIVEFLNRWITFSQSIISTLTGGGGSGGGGSGGGGSGGGGSDKTHTCPPCPAPEAAGGPSVFLFPPKPKDTLMISRTPEVTCVVVDVSHEDPEVKFNWYVDGVEVHNAKTKPREEQYNSTYRVVSVLQVLHVDWLNGKEYKCKVSNKALGAPIEKTISKAKGQPREPQVYTLPPSRDELTKNQVSLTCLVKGFYPSDIVVEWESNGQPENNYKTTPPVLDSDGSFFLYSKLTVDKSRWQQGNVFSCSVMHEALHNHYTQKSLSLSPGK

SEQ ID NO: 189 - protein, 380 aa, Artificial Sequence
  source: /note="Description of Artificial Sequence: Synthetic polypeptide"
APTSSSTKKTQLQLEHLLLDLQMILNGINNYKNPKLTQMLTFKFYMPKKATELKHLQCLEEELKPLEEALNLAPSKNFHLRPRVLISNINVIVLELKGSETTFMCEYADETATIVEFLNRWITFSQSIISTLTGGGGSGGGGSGGGGSGGGGSDKTHTCPPCPAPEAAGGPSVFLFPPKPKDTLMISRTPEVTCVVVDVSHEDPEVKFNWYVDGVEVHNAKTKPREEQYNSTYRVVSVLQVLHVDWLNGKEYKCKVSNKALGAPIEKTISKAKGQPREPQVYTLPPSRDELTKNQVSLTCLVKGFYPSDIVVEWESNGQPENNYKTTPPVLDSDGSFFLYSKLTVDKSRWQQGNVFSCSVMHEALHNHYTQKSLSLSPGK

SEQ ID NO: 190 - protein, 380 aa, Artificial Sequence
  source: /note="Description of Artificial Sequence: Synthetic polypeptide"
APTSSSTKKTQLQLEHLLLDLQMILNGINNYKNPKLTQMLTFKFYMPKKATELKHLQCLEEELKPLEEALNLAPSKNFHLRPRDLISNINVSVLELKGSETTFMCEYADETATIVEFLNRWITFSQSIISTLTGGGGSGGGGSGGGGSGGGGSDKTHTCPPCPAPEAAGGPSVFLFPPKPKDTLMISRTPEVTCVVVDVSHEDPEVKFNWYVDGVEVHNAKTKPREEQYNSTYRVVSVLQVLHVDWLNGKEYKCKVSNKALGAPIEKTISKAKGQPREPQVYTLPPSRDELTKNQVSLTCLVKGFYPSDIVVEWESNGQPENNYKTTPPVLDSDGSFFLYSKLTVDKSRWQQGNVFSCSVMHEALHNHYTQKSLSLSPGK

SEQ ID NO: 191 - protein, 380 aa, Artificial Sequence
  source: /note="Description of Artificial Sequence: Synthetic polypeptide"
APTSSSTKKTQLQLEHLLLDLQMILNGINNYKNPKLTNMLTFKFYMPKKATELKHLQCLEEELKPLEEALNLAPSKNFHLRPRDLISNINVIVLELKGSETTFMCEYADETATIVEFLNRWITFSQSIISTLTGGGGSGGGGSGGGGSGGGGSDKTHTCPPCPAPEAAGGPSVFLFPPKPKDTLMISRTPEVTCVVVDVSHEDPEVKFNWYVDGVEVHNAKTKPREEQYNSTYRVVSVLQVLHVDWLNGKEYKCKVSNKALGAPIEKTISKAKGQPREPQVYTLPPSRDELTKNQVSLTCLVKGFYPSDIVVEWESNGQPENNYKTTPPVLDSDGSFFLYSKLTVDKSRWQQGNVFSCSVMHEALHNHYTQKSLSLSPGK

SEQ ID NO: 192 - protein, 380 aa, Artificial Sequence
  source: /note="Description of Artificial Sequence: Synthetic polypeptide"
APTSSSTKKTQLQLENLLLDLQMILNGINNYKNPKLTNMLTFKFYMPKKATELKHLQCLEEELKPLEEALNLAPSKNFHLRPRDLISNINVIVLELKGSETTFMCEYADETATIVEFLNRWITFSQSIISTLTGGGGSGGGGSGGGGSGGGGSDKTHTCPPCPAPEAAGGPSVFLFPPKPKDTLMISRTPEVTCVVVDVSHEDPEVKFNWYVDGVEVHNAKTKPREEQYNSTYRVVSVLQVLHVDWLNGKEYKCKVSNKALGAPIEKTISKAKGQPREPQVYTLPPSRDELTKNQVSLTCLVKGFYPSDIVVEWESNGQPENNYKTTPPVLDSDGSFFLYSKLTVDKSRWQQGNVFSCSVMHEALHNHYTQKSLSLSPGK

SEQ ID NO: 193 - protein, 380 aa, Artificial Sequence
  source: /note="Description of Artificial Sequence: Synthetic polypeptide"
APTSSSTKKTQLQLELLLLDLQMILNGINNYKNPKLTNMLTFKFYMPKKATELKHLQCLEEELKPLEEALNLAPSKNFHLRPRDLISNINVIVLELKGSETTFMCEYADETATIVEFLNRWITFSQSIISTLTGGGGSGGGGSGGGGSGGGGSDKTHTCPPCPAPEAAGGPSVFLFPPKPKDTLMISRTPEVTCVVVDVSHEDPEVKFNWYVDGVEVHNAKTKPREEQYNSTYRVVSVLQVLHVDWLNGKEYKCKVSNKALGAPIEKTISKAKGQPREPQVYTLPPSRDELTKNQVSLTCLVKGFYPSDIVVEWESNGQPENNYKTTPPVLDSDGSFFLYSKLTVDKSRWQQGNVFSCSVMHEALHNHYTQKSLSLSPGK

SEQ ID NO: 194 - protein, 380 aa, Artificial Sequence
  source: /note="Description of Artificial Sequence: Synthetic polypeptide"
APTSSSTKKTQLQLEHLLLDLQMILNGINNYKNPKLTNMLTFKFYMPKKATELKHLQCLEEELKPLEEALNLAPSKNFHLRPRVLISNINVIVLELKGSETTFMCEYADETATIVEFLNRWITFSQSIISTLTGGGGSGGGGSGGGGSGGGGSDKTHTCPPCPAPEAAGGPSVFLFPPKPKDTLMISRTPEVTCVVVDVSHEDPEVKFNWYVDGVEVHNAKTKPREEQYNSTYRVVSVLQVLHVDWLNGKEYKCKVSNKALGAPIEKTISKAKGQPREPQVYTLPPSRDELTKNQVSLTCLVKGFYPSDIVVEWESNGQPENNYKTTPPVLDSDGSFFLYSKLTVDKSRWQQGNVFSCSVMHEALHNHYTQKSLSLSPGK

SEQ ID NO: 195 - protein, 380 aa, Artificial Sequence
  source: /note="Description of Artificial Sequence: Synthetic polypeptide"
APTSSSTKKTQLQLEHLLLDLQMILNGINNYKNPKLTNMLTFKFYMPKKATELKHLQCLEEELKPLEEALNLAPSKNFHLRPRDLISNINVSVLELKGSETTFMCEYADETATIVEFLNRWITFSQSIISTLTGGGGSGGGGSGGGGSGGGGSDKTHTCPPCPAPEAAGGPSVFLFPPKPKDTLMISRTPEVTCVVVDVSHEDPEVKFNWYVDGVEVHNAKTKPREEQYNSTYRVVSVLQVLHVDWLNGKEYKCKVSNKALGAPIEKTISKAKGQPREPQVYTLPPSRDELTKNQVSLTCLVKGFYPSDIVVEWESNGQPENNYKTTPPVLDSDGSFFLYSKLTVDKSRWQQGNVFSCSVMHEALHNHYTQKSLSLSPGK

SEQ ID NO: 196 - protein, 380 aa, Artificial Sequence
  source: /note="Description of Artificial Sequence: Synthetic polypeptide"
APTSSSTKKTQLQLEHLLLDLQMILNGINNYKNPKLTEMLTFKFYMPKKATELKHLQCLEEELKPLEEALNLAPSKNFHLRPRDLISNINVIVLELKGSETTFMCEYADETATIVEFLNRWITFSQSIISTLTGGGGSGGGGSGGGGSGGGGSDKTHTCPPCPAPEAAGGPSVFLFPPKPKDTLMISRTPEVTCVVVDVSHEDPEVKFNWYVDGVEVHNAKTKPREEQYNSTYRVVSVLQVLHVDWLNGKEYKCKVSNKALGAPIEKTISKAKGQPREPQVYTLPPSRDELTKNQVSLTCLVKGFYPSDIVVEWESNGQPENNYKTTPPVLDSDGSFFLYSKLTVDKSRWQQGNVFSCSVMHEALHNHYTQKSLSLSPGK

SEQ ID NO: 197 - protein, 380 aa, Artificial Sequence
  source: /note="Description of Artificial Sequence: Synthetic polypeptide"
APTSSSTKKTQLQLEHLLLDLQMILNGINNYKNPKLTRMLTKKFYMPKKATELKHLQCLEEELKPLEEALNLAPSKNFHLRPRDLISNINVIVLELKGSETTFMCEYADETATIVEFLNRWITFSQSIISTLTGGGGSGGGGSGGGGSGGGGSDKTHTCPPCPAPEAAGGPSVFLFPPKPKDTLMISRTPEVTCVVVDVSHEDPEVKFNWYVDGVEVHNAKTKPREEQYNSTYRVVSVLQVLHVDWLNGKEYKCKVSNKALGAPIEKTISKAKGQPREPQVYTLPPSRDELTKNQVSLTCLVKGFYPSDIVVEWESNGQPENNYKTTPPVLDSDGSFFLYSKLTVDKSRWQQGNVFSCSVMHEALHNHYTQKSLSLSPGK

SEQ ID NO: 198 - protein, 380 aa, Artificial Sequence
  source: /note="Description of Artificial Sequence: Synthetic polypeptide"
APTSSSTKKTQLQLEHLLLDLQMILNGINNYKNPKLTRMLTQKFYMPKKATELKHLQCLEEELKPLEEALNLAPSKNFHLRPRDLISNINVIVLELKGSETTFMCEYADETATIVEFLNRWITFSQSIISTLTGGGGSGGGGSGGGGSGGGGSDKTHTCPPCPAPEAAGGPSVFLFPPKPKDTLMISRTPEVTCVVVDVSHEDPEVKFNWYVDGVEVHNAKTKPREEQYNSTYRVVSVLQVLHVDWLNGKEYKCKVSNKALGAPIEKTISKAKGQPREPQVYTLPPSRDELTKNQVSLTCLVKGFYPSDIVVEWESNGQPENNYKTTPPVLDSDGSFFLYSKLTVDKSRWQQGNVFSCSVMHEALHNHYTQKSLSLSPGK

SEQ ID NO: 199 - protein, 380 aa, Artificial Sequence
  source: /note="Description of Artificial Sequence: Synthetic polypeptide"
APTSSSTKKTQLQLEHLLLDLQMILNGINNYKNPKLTRMLTAKFAMPKKATELKHLQCLEEELKPLEEALNGAPSKNFHLRPRDLISDINVIVLELKGSETTFMCEYADETATIVEFLNRWITFSQSIISTLTGGGGSGGGGSGGGGSGGGGSDKTHTCPPCPAPEAAGGPSVFLFPPKPKDTLMISRTPEVTCVVVDVSHEDPEVKFNWYVDGVEVHNAKTKPREEQYNSTYRVVSVLQVLHVDWLNGKEYKCKVSNKALGAPIEKTISKAKGQPREPQVYTLPPSRDELTKNQVSLTCLVKGFYPSDIVVEWESNGQPENNYKTTPPVLDSDGSFFLYSKLTVDKSRWQQGNVFSCSVMHEALHNHYTQKSLSLSPGK

SEQ ID NO: 200 - protein, 380 aa, Artificial Sequence
  source: /note="Description of Artificial Sequence: Synthetic polypeptide"
APTSSSTKKTQLQLEHLLLDLQMILNGINNYKNPKLTNMLTFKFYMPKKATELKHLQCLEEELKPLEEALNLAPSKNFHLRPRDLIRNINVIVLELKGSETTFMCEYADETATIVEFLNRWITFSQSIISTLTGGGGSGGGGSGGGGSGGGGSDKTHTCPPCPAPEAAGGPSVFLFPPKPKDTLMISRTPEVTCVVVDVSHEDPEVKFNWYVDGVEVHNAKTKPREEQYNSTYRVVSVLQVLHVDWLNGKEYKCKVSNKALGAPIEKTISKAKGQPREPQVYTLPPSRDELTKNQVSLTCLVKGFYPSDIVVEWESNGQPENNYKTTPPVLDSDGSFFLYSKLTVDKSRWQQGNVFSCSVMHEALHNHYTQKSLSLSPGK

SEQ ID NO: 201 - protein, 380 aa, Artificial Sequence
  source: /note="Description of Artificial Sequence: Synthetic polypeptide"
APTSSSTKKTQLQLENLLLDLQMILNGINNYKNPKLTEMLTFKFYMPKKATELKHLQCLEEELKPLEEALNLAPSKNFHLRPRDLISNINVIVLELKGSETTFMCEYADETATIVEFLNRWITFSQSIISTLTGGGGSGGGGSGGGGSGGGGSDKTHTCPPCPAPEAAGGPSVFLFPPKPKDTLMISRTPEVTCVVVDVSHEDPEVKFNWYVDGVEVHNAKTKPREEQYNSTYRVVSVLQVLHVDWLNGKEYKCKVSNKALGAPIEKTISKAKGQPREPQVYTLPPSRDELTKNQVSLTCLVKGFYPSDIVVEWESNGQPENNYKTTPPVLDSDGSFFLYSKLTVDKSRWQQGNVFSCSVMHEALHNHYTQKSLSLSPGK

SEQ ID NO: 202 - protein, 380 aa, Artificial Sequence
  source: /note="Description of Artificial Sequence: Synthetic polypeptide"
APTSSSTKKTQLQLEHLLLDLQMILNGINNYKNPKLTEMLTFKFYMPKKATELKHLQCLEEELKPLEEALNLAPSKNFHLRPRVLISNINVIVLELKGSETTFMCEYADETATIVEFLNRWITFSQSIISTLTGGGGSGGGGSGGGGSGGGGSDKTHTCPPCPAPEAAGGPSVFLFPPKPKDTLMISRTPEVTCVVVDVSHEDPEVKFNWYVDGVEVHNAKTKPREEQYNSTYRVVSVLQVLHVDWLNGKEYKCKVSNKALGAPIEKTISKAKGQPREPQVYTLPPSRDELTKNQVSLTCLVKGFYPSDIVVEWESNGQPENNYKTTPPVLDSDGSFFLYSKLTVDKSRWQQGNVFSCSVMHEALHNHYTQKSLSLSPGK

SEQ ID NO: 203 - protein, 380 aa, Artificial Sequence
  source: /note="Description of Artificial Sequence: Synthetic polypeptide"
APTSSSTKKTQLQLEHLLLDLQMILNGINNYKNPKLTEMLTFKFYMPKKATELKHLQCLEEELKPLEEALNLAPSKNFHLRPRDLIRNINVIVLELKGSETTFMCEYADETATIVEFLNRWITFSQSIISTLTGGGGSGGGGSGGGGSGGGGSDKTHTCPPCPAPEAAGGPSVFLFPPKPKDTLMISRTPEVTCVVVDVSHEDPEVKFNWYVDGVEVHNAKTKPREEQYNSTYRVVSVLQVLHVDWLNGKEYKCKVSNKALGAPIEKTISKAKGQPREPQVYTLPPSRDELTKNQVSLTCLVKGFYPSDIVVEWESNGQPENNYKTTPPVLDSDGSFFLYSKLTVDKSRWQQGNVFSCSVMHEALHNHYTQKSLSLSPGK

SEQ ID NO: 204 - protein, 380 aa, Artificial Sequence
  source: /note="Description of Artificial Sequence: Synthetic polypeptide"
APTSSSTKKTQLQLEHLLLDLQMILNGINNYKNPKLTEMLTFKFYMPKKATELKHLQCLEEELKPLEEALNLAPSKNFHLRPRDLISNINVSVLELKGSETTFMCEYADETATIVEFLNRWITFSQSIISTLTGGGGSGGGGSGGGGSGGGGSDKTHTCPPCPAPEAAGGPSVFLFPPKPKDTLMISRTPEVTCVVVDVSHEDPEVKFNWYVDGVEVHNAKTKPREEQYNSTYRVVSVLQVLHVDWLNGKEYKCKVSNKALGAPIEKTISKAKGQPREPQVYTLPPSRDELTKNQVSLTCLVKGFYPSDIVVEWESNGQPENNYKTTPPVLDSDGSFFLYSKLTVDKSRWQQGNVFSCSVMHEALHNHYTQKSLSLSPGK

SEQ ID NO: 205 - protein, 380 aa, Artificial Sequence
  source: /note="Description of Artificial Sequence: Synthetic polypeptide"
APTSSSTKKTQLQLENLLLDLQMILNGINNYKNPKLTRMLTQKFYMPKKATELKHLQCLEEELKPLEEALNLAPSKNFHLRPRDLISNINVIVLELKGSETTFMCEYADETATIVEFLNRWITFSQSIISTLTGGGGSGGGGSGGGGSGGGGSDKTHTCPPCPAPEAAGGPSVFLFPPKPKDTLMISRTPEVTCVVVDVSHEDPEVKFNWYVDGVEVHNAKTKPREEQYNSTYRVVSVLQVLHVDWLNGKEYKCKVSNKALGAPIEKTISKAKGQPREPQVYTLPPSRDELTKNQVSLTCLVKGFYPSDIVVEWESNGQPENNYKTTPPVLDSDGSFFLYSKLTVDKSRWQQGNVFSCSVMHEALHNHYTQKSLSLSPGK

SEQ ID NO: 206 - protein, 380 aa, Artificial Sequence
  source: /note="Description of Artificial Sequence: Synthetic polypeptide"
APTSSSTKKTQLQLEHLLLDLQMILNGINNYKNPKLTRMLTQKFYMPKKATELKHLQCLEEELKPLEEALNLAPSKNFHLRPRDLISNINVSVLELKGSETTFMCEYADETATIVEFLNRWITFSQSIISTLTGGGGSGGGGSGGGGSGGGGSDKTHTCPPCPAPEAAGGPSVFLFPPKPKDTLMISRTPEVTCVVVDVSHEDPEVKFNWYVDGVEVHNAKTKPREEQYNSTYRVVSVLQVLHVDWLNGKEYKCKVSNKALGAPIEKTISKAKGQPREPQVYTLPPSRDELTKNQVSLTCLVKGFYPSDIVVEWESNGQPENNYKTTPPVLDSDGSFFLYSKLTVDKSRWQQGNVFSCSVMHEALHNHYTQKSLSLSPGK

SEQ ID NO: 207 - protein, 380 aa, Artificial Sequence
  source: /note="Description of Artificial Sequence: Synthetic polypeptide"
APTSSSTKKTQLQLENLLLDLQMILNGINNYKNPELTNMLTFKFYMPKKATELKHLQCLEEELKPLEEALNLAPSKNFHLRPRDLISNINVIVLELKGSETTFMCEYADETATIVEFLNRWITFSQSIISTLTGGGGSGGGGSGGGGSGGGGSDKTHTCPPCPAPEAAGGPSVFLFPPKPKDTLMISRTPEVTCVVVDVSHEDPEVKFNWYVDGVEVHNAKTKPREEQYNSTYRVVSVLQVLHVDWLNGKEYKCKVSNKALGAPIEKTISKAKGQPREPQVYTLPPSRDELTKNQVSLTCLVKGFYPSDIVVEWESNGQPENNYKTTPPVLDSDGSFFLYSKLTVDKSRWQQGNVFSCSVMHEALHNHYTQKSLSLSPGK

SEQ ID NO: 208 - protein, 382 aa, Artificial Sequence
  source: /note="Description of Artificial Sequence: Synthetic polypeptide"
APTSSSTKKTQLQLEHLLLDLQMILNGINNYKNPKLTRMLTFKFYMPKKATELKHLQCLEEELKPLEEVLNLAQSKNFHLRPRDLISNINVIVLELKGSETTFMCEYADETATIVEFLNRWITFSQSIISTLTGGGGSGGGGSGGGGSGGGGSESKYGPPCPPCPAPEFLGGPSVFLFPPKPKDTLMISRTPEVTCVVVDVSQEDPEVQFNWYVDGVEVHNAKTKPREEQFNSTYRVVSVLTVLHQDWLNGKEYKCKVSNKGLPSSIEKTISKAKGQPREPQVYTLPPSQEEMTKNQVSLTCLVKGFYPSDIAVEWESNGQPENNYKTTPPVLDSDGSFFLYSRLTVDKSRWQEGNVFSCSVMHEALHNHYTQKSLSLSLGK

SEQ ID NO: 209 - protein, 382 aa, Artificial Sequence
  source: /note="Description of Artificial Sequence: Synthetic polypeptide"
APTSSSTKKTQLQLEHLLLDLQMILNGINNYKNPKLTRMLTFKFYMPKKATELKHLQCLEEELKPLEEALNLAPSKNFHLRPRDLISNINVIVLELKGSETTFMCEYADETATIVEFLNRWITFSQSIISTLTGGGGSGGGGSGGGGSGGGGSESKYGPPCPPCPAPEFLGGPSVFLFPPKPKDTLMISRTPEVTCVVVDVSQEDPEVQFNWYVDGVEVHNAKTKPREEQFNSTYRVVSVLTVLHQDWLNGKEYKCKVSNKGLPSSIEKTISKAKGQPREPQVYTLPPSQEEMTKNQVSLTCLVKGFYPSDIAVEWESNGQPENNYKTTPPVLDSDGSFFLYSRLTVDKSRWQEGNVFSCSVMHEALHNHYTQKSLSLSLGK

SEQ ID NO: 210 - protein, 382 aa, Artificial Sequence
  source: /note="Description of Artificial Sequence: Synthetic polypeptide"
APTSSSTKKTQLQLEDLLLDLQMILNGINNYKNPKLTRMLTFKFYMPKKATELKHLQCLEEELKPLEEALNLAPSKNFHLRPRDLISNINVIVLELKGSETTFMCEYADETATIVEFLNRWITFSQSIISTLTGGGGSGGGGSGGGGSGGGGSESKYGPPCPPCPAPEFLGGPSVFLFPPKPKDTLMISRTPEVTCVVVDVSQEDPEVQFNWYVDGVEVHNAKTKPREEQFNSTYRVVSVLTVLHQDWLNGKEYKCKVSNKGLPSSIEKTISKAKGQPREPQVYTLPPSQEEMTKNQVSLTCLVKGFYPSDIAVEWESNGQPENNYKTTPPVLDSDGSFFLYSRLTVDKSRWQEGNVFSCSVMHEALHNHYTQKSLSLSLGK

SEQ ID NO: 211 - protein, 382 aa, Artificial Sequence
  source: /note="Description of Artificial Sequence: Synthetic polypeptide"
APTSSSTKKTQLQLENLLLDLQMILNGINNYKNPKLTRMLTFKFYMPKKATELKHLQCLEEELKPLEEALNLAPSKNFHLRPRDLISNINVIVLELKGSETTFMCEYADETATIVEFLNRWITFSQSIISTLTGGGGSGGGGSGGGGSGGGGSESKYGPPCPPCPAPEFLGGPSVFLFPPKPKDTLMISRTPEVTCVVVDVSQEDPEVQFNWYVDGVEVHNAKTKPREEQFNSTYRVVSVLTVLHQDWLNGKEYKCKVSNKGLPSSIEKTISKAKGQPREPQVYTLPPSQEEMTKNQVSLTCLVKGFYPSDIAVEWESNGQPENNYKTTPPVLDSDGSFFLYSRLTVDKSRWQEGNVFSCSVMHEALHNHYTQKSLSLSLGK

SEQ ID NO: 212 - protein, 382 aa, Artificial Sequence
  source: /note="Description of Artificial Sequence: Synthetic polypeptide"
APTSSSTKKTQLQLELLLLDLQMILNGINNYKNPKLTRMLTFKFYMPKKATELKHLQCLEEELKPLEEALNLAPSKNFHLRPRDLISNINVIVLELKGSETTFMCEYADETATIVEFLNRWITFSQSIISTLTGGGGSGGGGSGGGGSGGGGSESKYGPPCPPCPAPEFLGGPSVFLFPPKPKDTLMISRTPEVTCVVVDVSQEDPEVQFNWYVDGVEVHNAKTKPREEQFNSTYRVVSVLTVLHQDWLNGKEYKCKVSNKGLPSSIEKTISKAKGQPREPQVYTLPPSQEEMTKNQVSLTCLVKGFYPSDIAVEWESNGQPENNYKTTPPVLDSDGSFFLYSRLTVDKSRWQEGNVFSCSVMHEALHNHYTQKSLSLSLGK

SEQ ID NO: 213 - protein, 382 aa, Artificial Sequence
  source: /note="Description of Artificial Sequence: Synthetic polypeptide"
APTSSSTKKTQLQLEHLLLDLQMILNGTNNYKNPKLTRMLTFKFYMPKKATELKHLQCLEEELKPLEEALNLAPSKNFHLRPRDLISNINVIVLELKGSETTFMCEYADETATIVEFLNRWITFSQSIISTLTGGGGSGGGGSGGGGSGGGGSESKYGPPCPPCPAPEFLGGPSVFLFPPKPKDTLMISRTPEVTCVVVDVSQEDPEVQFNWYVDGVEVHNAKTKPREEQFNSTYRVVSVLTVLHQDWLNGKEYKCKVSNKGLPSSIEKTISKAKGQPREPQVYTLPPSQEEMTKNQVSLTCLVKGFYPSDIAVEWESNGQPENNYKTTPPVLDSDGSFFLYSRLTVDKSRWQEGNVFSCSVMHEALHNHYTQKSLSLSLGK

SEQ ID NO: 214 - protein, 382 aa, Artificial Sequence
  source: /note="Description of Artificial Sequence: Synthetic polypeptide"
APTSSSTKKTQLQLEHLLLDLQMILNGINNYKNPKLTRMLTFKFYMPKKATELKHLQCLEEELKPLEEALNLAPSKNFHLRPRVLISNINVIVLELKGSETTFMCEYADETATIVEFLNRWITFSQSIISTLTGGGGSGGGGSGGGGSGGGGSESKYGPPCPPCPAPEFLGGPSVFLFPPKPKDTLMISRTPEVTCVVVDVSQEDPEVQFNWYVDGVEVHNAKTKPREEQFNSTYRVVSVLTVLHQDWLNGKEYKCKVSNKGLPSSIEKTISKAKGQPREPQVYTLPPSQEEMTKNQVSLTCLVKGFYPSDIAVEWESNGQPENNYKTTPPVLDSDGSFFLYSRLTVDKSRWQEGNVFSCSVMHEALHNHYTQKSLSLSLGK

SEQ ID NO: 215 - protein, 382 aa, Artificial Sequence
  source: /note="Description of Artificial Sequence: Synthetic polypeptide"
APTSSSTKKTQLQLEHLLLDLQMILNGINNYKNPKLTRMLTFKFYMPKKATELKHLQCLEEELKPLEEALNLAPSKNFHLRPRDLIRNINVIVLELKGSETTFMCEYADETATIVEFLNRWITFSQSIISTLTGGGGSGGGGSGGGGSGGGGSESKYGPPCPPCPAPEFLGGPSVFLFPPKPKDTLMISRTPEVTCVVVDVSQEDPEVQFNWYVDGVEVHNAKTKPREEQFNSTYRVVSVLTVLHQDWLNGKEYKCKVSNKGLPSSIEKTISKAKGQPREPQVYTLPPSQEEMTKNQVSLTCLVKGFYPSDIAVEWESNGQPENNYKTTPPVLDSDGSFFLYSRLTVDKSRWQEGNVFSCSVMHEALHNHYTQKSLSLSLGK

SEQ ID NO: 216 - protein, 382 aa, Artificial Sequence
  source: /note="Description of Artificial Sequence: Synthetic polypeptide"
APTSSSTKKTQLQLEHLLLDLQMILNGINNYKNPKLTRMLTFKFYMPKKATELKHLQCLEEELKPLEEALNLAPSKNFHLRPRDLISLINVIVLELKGSETTFMCEYADETATIVEFLNRWITFSQSIISTLTGGGGSGGGGSGGGGSGGGGSESKYGPPCPPCPAPEFLGGPSVFLFPPKPKDTLMISRTPEVTCVVVDVSQEDPEVQFNWYVDGVEVHNAKTKPREEQFNSTYRVVSVLTVLHQDWLNGKEYKCKVSNKGLPSSIEKTISKAKGQPREPQVYTLPPSQEEMTKNQVSLTCLVKGFYPSDIAVEWESNGQPENNYKTTPPVLDSDGSFFLYSRLTVDKSRWQEGNVFSCSVMHEALHNHYTQKSLSLSLGK

SEQ ID NO: 217 - protein, 382 aa, Artificial Sequence
  source: /note="Description of Artificial Sequence: Synthetic polypeptide"
APTSSSTKKTQLQLEHLLLDLQMILNGINNYKNPKLTRMLTFKFYMPKKATELKHLQCLEEELKPLEEALNLAPSKNFHLRPRDLISSINVIVLELKGSETTFMCEYADETATIVEFLNRWITFSQSIISTLTGGGGSGGGGSGGGGSGGGGSESKYGPPCPPCPAPEFLGGPSVFLFPPKPKDTLMISRTPEVTCVVVDVSQEDPEVQFNWYVDGVEVHNAKTKPREEQFNSTYRVVSVLTVLHQDWLNGKEYKCKVSNKGLPSSIEKTISKAKGQPREPQVYTLPPSQEEMTKNQVSLTCLVKGFYPSDIAVEWESNGQPENNYKTTPPVLDSDGSFFLYSRLTVDKSRWQEGNVFSCSVMHEALHNHYTQKSLSLSLGK

SEQ ID NO: 218 - protein, 382 aa, Artificial Sequence
  source: /note="Description of Artificial Sequence: Synthetic polypeptide"
APTSSSTKKTQLQLEHLLLDLQMILNGINNYKNPKLTRMLTFKFYMPKKATELKHLQCLEEELKPLEEALNLAPSKNFHLRPRDLISNINVSVLELKGSETTFMCEYADETATIVEFLNRWITFSQSIISTLTGGGGSGGGGSGGGGSGGGGSESKYGPPCPPCPAPEFLGGPSVFLFPPKPKDTLMISRTPEVTCVVVDVSQEDPEVQFNWYVDGVEVHNAKTKPREEQFNSTYRVVSVLTVLHQDWLNGKEYKCKVSNKGLPSSIEKTISKAKGQPREPQVYTLPPSQEEMTKNQVSLTCLVKGFYPSDIAVEWESNGQPENNYKTTPPVLDSDGSFFLYSRLTVDKSRWQEGNVFSCSVMHEALHNHYTQKSLSLSLGK

SEQ ID NO: 219 - protein, 382 aa, Artificial Sequence
  source: /note="Description of Artificial Sequence: Synthetic polypeptide"
APTSSSTKKTQLQLEHLLLDLQMILNGINNYKNPELTRMLTFKFYMPKKATELKHLQCLEEELKPLEEALNLAPSKNFHLRPRDLISNINVIVLELKGSETTFMCEYADETATIVEFLNRWITFSQSIISTLTGGGGSGGGGSGGGGSGGGGSESKYGPPCPPCPAPEFLGGPSVFLFPPKPKDTLMISRTPEVTCVVVDVSQEDPEVQFNWYVDGVEVHNAKTKPREEQFNSTYRVVSVLTVLHQDWLNGKEYKCKVSNKGLPSSIEKTISKAKGQPREPQVYTLPPSQEEMTKNQVSLTCLVKGFYPSDIAVEWESNGQPENNYKTTPPVLDSDGSFFLYSRLTVDKSRWQEGNVFSCSVMHEALHNHYTQKSLSLSLGK

SEQ ID NO: 220 - protein, 382 aa, Artificial Sequence
  source: /note="Description of Artificial Sequence: Synthetic polypeptide"
APTSSSTKKTQLQLENLLLDLQMILNGINNYKNPELTRMLTFKFYMPKKATELKHLQCLEEELKPLEEALNLAPSKNFHLRPRDLISNINVIVLELKGSETTFMCEYADETATIVEFLNRWITFSQSIISTLTGGGGSGGGGSGGGGSGGGGSESKYGPPCPPCPAPEFLGGPSVFLFPPKPKDTLMISRTPEVTCVVVDVSQEDPEVQFNWYVDGVEVHNAKTKPREEQFNSTYRVVSVLTVLHQDWLNGKEYKCKVSNKGLPSSIEKTISKAKGQPREPQVYTLPPSQEEMTKNQVSLTCLVKGFYPSDIAVEWESNGQPENNYKTTPPVLDSDGSFFLYSRLTVDKSRWQEGNVFSCSVMHEALHNHYTQKSLSLSLGK

SEQ ID NO: 221 - protein, 382 aa, Artificial Sequence
  source: /note="Description of Artificial Sequence: Synthetic polypeptide"
APTSSSTKKTQLQLELLLLDLQMILNGINNYKNPELTRMLTFKFYMPKKATELKHLQCLEEELKPLEEALNLAPSKNFHLRPRDLISNINVIVLELKGSETTFMCEYADETATIVEFLNRWITFSQSIISTLTGGGGSGGGGSGGGGSGGGGSESKYGPPCPPCPAPEFLGGPSVFLFPPKPKDTLMISRTPEVTCVVVDVSQEDPEVQFNWYVDGVEVHNAKTKPREEQFNSTYRVVSVLTVLHQDWLNGKEYKCKVSNKGLPSSIEKTISKAKGQPREPQVYTLPPSQEEMTKNQVSLTCLVKGFYPSDIAVEWESNGQPENNYKTTPPVLDSDGSFFLYSRLTVDKSRWQEGNVFSCSVMHEALHNHYTQKSLSLSLGK

SEQ ID NO: 222 - protein, 382 aa, Artificial Sequence
  source: /note="Description of Artificial Sequence: Synthetic polypeptide"
APTSSSTKKTQLQLEHLLLDLQMILNGINNYKNPELTRMLTFKFYMPKKATELKHLQCLEEELKPLEEALNLAPSKNFHLRPRVLISNINVIVLELKGSETTFMCEYADETATIVEFLNRWITFSQSIISTLTGGGGSGGGGSGGGGSGGGGSESKYGPPCPPCPAPEFLGGPSVFLFPPKPKDTLMISRTPEVTCVVVDVSQEDPEVQFNWYVDGVEVHNAKTKPREEQFNSTYRVVSVLTVLHQDWLNGKEYKCKVSNKGLPSSIEKTISKAKGQPREPQVYTLPPSQEEMTKNQVSLTCLVKGFYPSDIAVEWESNGQPENNYKTTPPVLDSDGSFFLYSRLTVDKSRWQEGNVFSCSVMHEALHNHYTQKSLSLSLGK

SEQ ID NO: 223 - protein, 382 aa, Artificial Sequence
  source: /note="Description of Artificial Sequence: Synthetic polypeptide"
APTSSSTKKTQLQLEHLLLDLQMILNGINNYKNPELTRMLTFKFYMPKKATELKHLQCLEEELKPLEEALNLAPSKNFHLRPRDLISNINVSVLELKGSETTFMCEYADETATIVEFLNRWITFSQSIISTLTGGGGSGGGGSGGGGSGGGGSESKYGPPCPPCPAPEFLGGPSVFLFPPKPKDTLMISRTPEVTCVVVDVSQEDPEVQFNWYVDGVEVHNAKTKPREEQFNSTYRVVSVLTVLHQDWLNGKEYKCKVSNKGLPSSIEKTISKAKGQPREPQVYTLPPSQEEMTKNQVSLTCLVKGFYPSDIAVEWESNGQPENNYKTTPPVLDSDGSFFLYSRLTVDKSRWQEGNVFSCSVMHEALHNHYTQKSLSLSLGK

SEQ ID NO: 224 - protein, 382 aa, Artificial Sequence
  source: /note="Description of Artificial Sequence: Synthetic polypeptide"
APTSSSTKKTQLQLEHLLLDLQMILNGINNYKNPKLTQMLTFKFYMPKKATELKHLQCLEEELKPLEEALNLAPSKNFHLRPRDLISNINVIVLELKGSETTFMCEYADETATIVEFLNRWITFSQSIISTLTGGGGSGGGGSGGGGSGGGGSESKYGPPCPPCPAPEFLGGPSVFLFPPKPKDTLMISRTPEVTCVVVDVSQEDPEVQFNWYVDGVEVHNAKTKPREEQFNSTYRVVSVLTVLHQDWLNGKEYKCKVSNKGLPSSIEKTISKAKGQPREPQVYTLPPSQEEMTKNQVSLTCLVKGFYPSDIAVEWESNGQPENNYKTTPPVLDSDGSFFLYSRLTVDKSRWQEGNVFSCSVMHEALHNHYTQKSLSLSLGK

SEQ ID NO: 225 - protein, 382 aa, Artificial Sequence
  source: /note="Description of Artificial Sequence: Synthetic polypeptide"
APTSSSTKKTQLQLENLLLDLQMILNGINNYKNPKLTQMLTFKFYMPKKATELKHLQCLEEELKPLEEALNLAPSKNFHLRPRDLISNINVIVLELKGSETTFMCEYADETATIVEFLNRWITFSQSIISTLTGGGGSGGGGSGGGGSGGGGSESKYGPPCPPCPAPEFLGGPSVFLFPPKPKDTLMISRTPEVTCVVVDVSQEDPEVQFNWYVDGVEVHNAKTKPREEQFNSTYRVVSVLTVLHQDWLNGKEYKCKVSNKGLPSSIEKTISKAKGQPREPQVYTLPPSQEEMTKNQVSLTCLVKGFYPSDIAVEWESNGQPENNYKTTPPVLDSDGSFFLYSRLTVDKSRWQEGNVFSCSVMHEALHNHYTQKSLSLSLGK

SEQ ID NO: 226 - protein, 382 aa, Artificial Sequence
  source: /note="Description of Artificial Sequence: Synthetic polypeptide"
APTSSSTKKTQLQLELLLLDLQMILNGINNYKNPKLTQMLTFKFYMPKKATELKHLQCLEEELKPLEEALNLAPSKNFHLRPRDLISNINVIVLELKGSETTFMCEYADETATIVEFLNRWITFSQSIISTLTGGGGSGGGGSGGGGSGGGGSESKYGPPCPPCPAPEFLGGPSVFLFPPKPKDTLMISRTPEVTCVVVDVSQEDPEVQFNWYVDGVEVHNAKTKPREEQFNSTYRVVSVLTVLHQDWLNGKEYKCKVSNKGLPSSIEKTISKAKGQPREPQVYTLPPSQEEMTKNQVSLTCLVKGFYPSDIAVEWESNGQPENNYKTTPPVLDSDGSFFLYSRLTVDKSRWQEGNVFSCSVMHEALHNHYTQKSLSLSLGK

SEQ ID NO: 227 - protein, 382 aa, Artificial Sequence
  source: /note="Description of Artificial Sequence: Synthetic polypeptide"
APTSSSTKKTQLQLEHLLLDLQMILNGINNYKNPKLTQMLTFKFYMPKKATELKHLQCLEEELKPLEEALNLAPSKNFHLRPRVLISNINVIVLELKGSETTFMCEYADETATIVEFLNRWITFSQSIISTLTGGGGSGGGGSGGGGSGGGGSESKYGPPCPPCPAPEFLGGPSVFLFPPKPKDTLMISRTPEVTCVVVDVSQEDPEVQFNWYVDGVEVHNAKTKPREEQFNSTYRVVSVLTVLHQDWLNGKEYKCKVSNKGLPSSIEKTISKAKGQPREPQVYTLPPSQEEMTKNQVSLTCLVKGFYPSDIAVEWESNGQPENNYKTTPPVLDSDGSFFLYSRLTVDKSRWQEGNVFSCSVMHEALHNHYTQKSLSLSLGK

SEQ ID NO: 228 - protein, 382 aa, Artificial Sequence
  source: /note="Description of Artificial Sequence: Synthetic polypeptide"
APTSSSTKKTQLQLEHLLLDLQMILNGINNYKNPKLTQMLTFKFYMPKKATELKHLQCLEEELKPLEEALNLAPSKNFHLRPRDLISNINVSVLELKGSETTFMCEYADETATIVEFLNRWITFSQSIISTLTGGGGSGGGGSGGGGSGGGGSESKYGPPCPPCPAPEFLGGPSVFLFPPKPKDTLMISRTPEVTCVVVDVSQEDPEVQFNWYVDGVEVHNAKTKPREEQFNSTYRVVSVLTVLHQDWLNGKEYKCKVSNKGLPSSIEKTISKAKGQPREPQVYTLPPSQEEMTKNQVSLTCLVKGFYPSDIAVEWESNGQPENNYKTTPPVLDSDGSFFLYSRLTVDKSRWQEGNVFSCSVMHEALHNHYTQKSLSLSLGK

SEQ ID NO: 229 - protein, 382 aa, Artificial Sequence
  source: /note="Description of Artificial Sequence: Synthetic polypeptide"
APTSSSTKKTQLQLEHLLLDLQMILNGINNYKNPKLTNMLTFKFYMPKKATELKHLQCLEEELKPLEEALNLAPSKNFHLRPRDLISNINVIVLELKGSETTFMCEYADETATIVEFLNRWITFSQSIISTLTGGGGSGGGGSGGGGSGGGGSESKYGPPCPPCPAPEFLGGPSVFLFPPKPKDTLMISRTPEVTCVVVDVSQEDPEVQFNWYVDGVEVHNAKTKPREEQFNSTYRVVSVLTVLHQDWLNGKEYKCKVSNKGLPSSIEKTISKAKGQPREPQVYTLPPSQEEMTKNQVSLTCLVKGFYPSDIAVEWESNGQPENNYKTTPPVLDSDGSFFLYSRLTVDKSRWQEGNVFSCSVMHEALHNHYTQKSLSLSLGK

SEQ ID NO: 230 - protein, 382 aa, Artificial Sequence
  source: /note="Description of Artificial Sequence: Synthetic polypeptide"
APTSSSTKKTQLQLENLLLDLQMILNGINNYKNPKLTNMLTFKFYMPKKATELKHLQCLEEELKPLEEALNLAPSKNFHLRPRDLISNINVIVLELKGSETTFMCEYADETATIVEFLNRWITFSQSIISTLTGGGGSGGGGSGGGGSGGGGSESKYGPPCPPCPAPEFLGGPSVFLFPPKPKDTLMISRTPEVTCVVVDVSQEDPEVQFNWYVDGVEVHNAKTKPREEQFNSTYRVVSVLTVLHQDWLNGKEYKCKVSNKGLPSSIEKTISKAKGQPREPQVYTLPPSQEEMTKNQVSLTCLVKGFYPSDIAVEWESNGQPENNYKTTPPVLDSDGSFFLYSRLTVDKSRWQEGNVFSCSVMHEALHNHYTQKSLSLSLGK

SEQ ID NO: 231 - protein, 382 aa, Artificial Sequence
  source: /note="Description of Artificial Sequence: Synthetic polypeptide"
APTSSSTKKTQLQLELLLLDLQMILNGINNYKNPKLTNMLTFKFYMPKKATELKHLQCLEEELKPLEEALNLAPSKNFHLRPRDLISNINVIVLELKGSETTFMCEYADETATIVEFLNRWITFSQSIISTLTGGGGSGGGGSGGGGSGGGGSESKYGPPCPPCPAPEFLGGPSVFLFPPKPKDTLMISRTPEVTCVVVDVSQEDPEVQFNWYVDGVEVHNAKTKPREEQFNSTYRVVSVLTVLHQDWLNGKEYKCKVSNKGLPSSIEKTISKAKGQPREPQVYTLPPSQEEMTKNQVSLTCLVKGFYPSDIAVEWESNGQPENNYKTTPPVLDSDGSFFLYSRLTVDKSRWQEGNVFSCSVMHEALHNHYTQKSLSLSLGK

SEQ ID NO: 232 - protein, 382 aa, Artificial Sequence
  source: /note="Description of Artificial Sequence: Synthetic polypeptide"
APTSSSTKKTQLQLEHLLLDLQMILNGINNYKNPKLTNMLTFKFYMPKKATELKHLQCLEEELKPLEEALNLAPSKNFHLRPRVLISNINVIVLELKGSETTFMCEYADETATIVEFLNRWITFSQSIISTLTGGGGSGGGGSGGGGSGGGGSESKYGPPCPPCPAPEFLGGPSVFLFPPKPKDTLMISRTPEVTCVVVDVSQEDPEVQFNWYVDGVEVHNAKTKPREEQFNSTYRVVSVLTVLHQDWLNGKEYKCKVSNKGLPSSIEKTISKAKGQPREPQVYTLPPSQEEMTKNQVSLTCLVKGFYPSDIAVEWESNGQPENNYKTTPPVLDSDGSFFLYSRLTVDKSRWQEGNVFSCSVMHEALHNHYTQKSLSLSLGK

SEQ ID NO: 233 - protein, 382 aa, Artificial Sequence
  source: /note="Description of Artificial Sequence: Synthetic polypeptide"
APTSSSTKKTQLQLEHLLLDLQMILNGINNYKNPKLTNMLTFKFYMPKKATELKHLQCLEEELKPLEEALNLAPSKNFHLRPRDLISNINVSVLELKGSETTFMCEYADETATIVEFLNRWITFSQSIISTLTGGGGSGGGGSGGGGSGGGGSESKYGPPCPPCPAPEFLGGPSVFLFPPKPKDTLMISRTPEVTCVVVDVSQEDPEVQFNWYVDGVEVHNAKTKPREEQFNSTYRVVSVLTVLHQDWLNGKEYKCKVSNKGLPSSIEKTISKAKGQPREPQVYTLPPSQEEMTKNQVSLTCLVKGFYPSDIAVEWESNGQPENNYKTTPPVLDSDGSFFLYSRLTVDKSRWQEGNVFSCSVMHEALHNHYTQKSLSLSLGK

SEQ ID NO: 234 - protein, 382 aa, Artificial Sequence
  source: /note="Description of Artificial Sequence: Synthetic polypeptide"
APTSSSTKKTQLQLEHLLLDLQMILNGINNYKNPKLTEMLTFKFYMPKKATELKHLQCLEEELKPLEEALNLAPSKNFHLRPRDLISNINVIVLELKGSETTFMCEYADETATIVEFLNRWITFSQSIISTLTGGGGSGGGGSGGGGSGGGGSESKYGPPCPPCPAPEFLGGPSVFLFPPKPKDTLMISRTPEVTCVVVDVSQEDPEVQFNWYVDGVEVHNAKTKPREEQFNSTYRVVSVLTVLHQDWLNGKEYKCKVSNKGLPSSIEKTISKAKGQPREPQVYTLPPSQEEMTKNQVSLTCLVKGFYPSDIAVEWESNGQPENNYKTTPPVLDSDGSFFLYSRLTVDKSRWQEGNVFSCSVMHEALHNHYTQKSLSLSLGK

SEQ ID NO: 235 - protein, 382 aa, Artificial Sequence
  source: /note="Description of Artificial Sequence: Synthetic polypeptide"
APTSSSTKKTQLQLEHLLLDLQMILNGINNYKNPKLTRMLTKKFYMPKKATELKHLQCLEEELKPLEEALNLAPSKNFHLRPRDLISNINVIVLELKGSETTFMCEYADETATIVEFLNRWITFSQSIISTLTGGGGSGGGGSGGGGSGGGGSESKYGPPCPPCPAPEFLGGPSVFLFPPKPKDTLMISRTPEVTCVVVDVSQEDPEVQFNWYVDGVEVHNAKTKPREEQFNSTYRVVSVLTVLHQDWLNGKEYKCKVSNKGLPSSIEKTISKAKGQPREPQVYTLPPSQEEMTKNQVSLTCLVKGFYPSDIAVEWESNGQPENNYKTTPPVLDSDGSFFLYSRLTVDKSRWQEGNVFSCSVMHEALHNHYTQKSLSLSLGK

SEQ ID NO: 236 - protein, 382 aa, Artificial Sequence
  source: /note="Description of Artificial Sequence: Synthetic polypeptide"
APTSSSTKKTQLQLEHLLLDLQMILNGINNYKNPKLTRMLTQKFYMPKKATELKHLQCLEEELKPLEEALNLAPSKNFHLRPRDLISNINVIVLELKGSETTFMCEYADETATIVEFLNRWITFSQSIISTLTGGGGSGGGGSGGGGSGGGGSESKYGPPCPPCPAPEFLGGPSVFLFPPKPKDTLMISRTPEVTCVVVDVSQEDPEVQFNWYVDGVEVHNAKTKPREEQFNSTYRVVSVLTVLHQDWLNGKEYKCKVSNKGLPSSIEKTISKAKGQPREPQVYTLPPSQEEMTKNQVSLTCLVKGFYPSDIAVEWESNGQPENNYKTTPPVLDSDGSFFLYSRLTVDKSRWQEGNVFSCSVMHEALHNHYTQKSLSLSLGK

SEQ ID NO: 237 - protein, 382 aa, Artificial Sequence
  source: /note="Description of Artificial Sequence: Synthetic polypeptide"
APTSSSTKKTQLQLEHLLLDLQMILNGINNYKNPKLTRMLTAKFAMPKKATELKHLQCLEEELKPLEEALNGAPSKNFHLRPRDLISDINVIVLELKGSETTFMCEYADETATIVEFLNRWITFSQSIISTLTGGGGSGGGGSGGGGSGGGGSESKYGPPCPPCPAPEFLGGPSVFLFPPKPKDTLMISRTPEVTCVVVDVSQEDPEVQFNWYVDGVEVHNAKTKPREEQFNSTYRVVSVLTVLHQDWLNGKEYKCKVSNKGLPSSIEKTISKAKGQPREPQVYTLPPSQEEMTKNQVSLTCLVKGFYPSDIAVEWESNGQPENNYKTTPPVLDSDGSFFLYSRLTVDKSRWQEGNVFSCSVMHEALHNHYTQKSLSLSLGK

SEQ ID NO: 238 - protein, 382 aa, Artificial Sequence
  source: /note="Description of Artificial Sequence: Synthetic polypeptide"
APTSSSTKKTQLQLEHLLLDLQMILNGINNYKNPKLTNMLTFKFYMPKKATELKHLQCLEEELKPLEEALNLAPSKNFHLRPRDLIRNINVIVLELKGSETTFMCEYADETATIVEFLNRWITFSQSIISTLTGGGGSGGGGSGGGGSGGGGSESKYGPPCPPCPAPEFLGGPSVFLFPPKPKDTLMISRTPEVTCVVVDVSQEDPEVQFNWYVDGVEVHNAKTKPREEQFNSTYRVVSVLTVLHQDWLNGKEYKCKVSNKGLPSSIEKTISKAKGQPREPQVYTLPPSQEEMTKNQVSLTCLVKGFYPSDIAVEWESNGQPENNYKTTPPVLDSDGSFFLYSRLTVDKSRWQEGNVFSCSVMHEALHNHYTQKSLSLSLGK

SEQ ID NO: 239 - protein, 382 aa, Artificial Sequence
  source: /note="Description of Artificial Sequence: Synthetic polypeptide"
APTSSSTKKTQLQLENLLLDLQMILNGINNYKNPKLTEMLTFKFYMPKKATELKHLQCLEEELKPLEEALNLAPSKNFHLRPRDLISNINVIVLELKGSETTFMCEYADETATIVEFLNRWITFSQSIISTLTGGGGSGGGGSGGGGSGGGGSESKYGPPCPPCPAPEFLGGPSVFLFPPKPKDTLMISRTPEVTCVVVDVSQEDPEVQFNWYVDGVEVHNAKTKPREEQFNSTYRVVSVLTVLHQDWLNGKEYKCKVSNKGLPSSIEKTISKAKGQPREPQVYTLPPSQEEMTKNQVSLTCLVKGFYPSDIAVEWESNGQPENNYKTTPPVLDSDGSFFLYSRLTVDKSRWQEGNVFSCSVMHEALHNHYTQKSLSLSLGK

SEQ ID NO: 240 - protein, 382 aa, Artificial Sequence
  source: /note="Description of Artificial Sequence: Synthetic polypeptide"
APTSSSTKKTQLQLEHLLLDLQMILNGINNYKNPKLTEMLTFKFYMPKKATELKHLQCLEEELKPLEEALNLAPSKNFHLRPRVLISNINVIVLELKGSETTFMCEYADETATIVEFLNRWITFSQSIISTLTGGGGSGGGGSGGGGSGGGGSESKYGPPCPPCPAPEFLGGPSVFLFPPKPKDTLMISRTPEVTCVVVDVSQEDPEVQFNWYVDGVEVHNAKTKPREEQFNSTYRVVSVLTVLHQDWLNGKEYKCKVSNKGLPSSIEKTISKAKGQPREPQVYTLPPSQEEMTKNQVSLTCLVKGFYPSDIAVEWESNGQPENNYKTTPPVLDSDGSFFLYSRLTVDKSRWQEGNVFSCSVMHEALHNHYTQKSLSLSLGK

SEQ ID NO: 241 - protein, 382 aa, Artificial Sequence
  source: /note="Description of Artificial Sequence: Synthetic polypeptide"
APTSSSTKKTQLQLEHLLLDLQMILNGINNYKNPKLTEMLTFKFYMPKKATELKHLQCLEEELKPLEEALNLAPSKNFHLRPRDLIRNINVIVLELKGSETTFMCEYADETATIVEFLNRWITFSQSIISTLTGGGGSGGGGSGGGGSGGGGSESKYGPPCPPCPAPEFLGGPSVFLFPPKPKDTLMISRTPEVTCVVVDVSQEDPEVQFNWYVDGVEVHNAKTKPREEQFNSTYRVVSVLTVLHQDWLNGKEYKCKVSNKGLPSSIEKTISKAKGQPREPQVYTLPPSQEEMTKNQVSLTCLVKGFYPSDIAVEWESNGQPENNYKTTPPVLDSDGSFFLYSRLTVDKSRWQEGNVFSCSVMHEALHNHYTQKSLSLSLGK

SEQ ID NO: 242 - protein, 382 aa, Artificial Sequence
  source: /note="Description of Artificial Sequence: Synthetic polypeptide"
APTSSSTKKTQLQLEHLLLDLQMILNGINNYKNPKLTEMLTFKFYMPKKATELKHLQCLEEELKPLEEALNLAPSKNFHLRPRDLISNINVSVLELKGSETTFMCEYADETATIVEFLNRWITFSQSIISTLTGGGGSGGGGSGGGGSGGGGSESKYGPPCPPCPAPEFLGGPSVFLFPPKPKDTLMISRTPEVTCVVVDVSQEDPEVQFNWYVDGVEVHNAKTKPREEQFNSTYRVVSVLTVLHQDWLNGKEYKCKVSNKGLPSSIEKTISKAKGQPREPQVYTLPPSQEEMTKNQVSLTCLVKGFYPSDIAVEWESNGQPENNYKTTPPVLDSDGSFFLYSRLTVDKSRWQEGNVFSCSVMHEALHNHYTQKSLSLSLGK

SEQ ID NO: 243 - protein, 382 aa, Artificial Sequence
  source: /note="Description of Artificial Sequence: Synthetic polypeptide"
APTSSSTKKTQLQLENLLLDLQMILNGINNYKNPKLTRMLTQKFYMPKKATELKHLQCLEEELKPLEEALNLAPSKNFHLRPRDLISNINVIVLELKGSETTFMCEYADETATIVEFLNRWITFSQSIISTLTGGGGSGGGGSGGGGSGGGGSESKYGPPCPPCPAPEFLGGPSVFLFPPKPKDTLMISRTPEVTCVVVDVSQEDPEVQFNWYVDGVEVHNAKTKPREEQFNSTYRVVSVLTVLHQDWLNGKEYKCKVSNKGLPSSIEKTISKAKGQPREPQVYTLPPSQEEMTKNQVSLTCLVKGFYPSDIAVEWESNGQPENNYKTTPPVLDSDGSFFLYSRLTVDKSRWQEGNVFSCSVMHEALHNHYTQKSLSLSLGK

SEQ ID NO: 244 - protein, 382 aa, Artificial Sequence
  source: /note="Description of Artificial Sequence: Synthetic polypeptide"
APTSSSTKKTQLQLEHLLLDLQMILNGINNYKNPKLTRMLTQKFYMPKKATELKHLQCLEEELKPLEEALNLAPSKNFHLRPRDLISNINVSVLELKGSETTFMCEYADETATIVEFLNRWITFSQSIISTLTGGGGSGGGGSGGGGSGGGGSESKYGPPCPPCPAPEFLGGPSVFLFPPKPKDTLMISRTPEVTCVVVDVSQEDPEVQFNWYVDGVEVHNAKTKPREEQFNSTYRVVSVLTVLHQDWLNGKEYKCKVSNKGLPSSIEKTISKAKGQPREPQVYTLPPSQEEMTKNQVSLTCLVKGFYPSDIAVEWESNGQPENNYKTTPPVLDSDGSFFLYSRLTVDKSRWQEGNVFSCSVMHEALHNHYTQKSLSLSLGK

SEQ ID NO: 245 - protein, 382 aa, Artificial Sequence
  source: /note="Description of Artificial Sequence: Synthetic polypeptide"
APTSSSTKKTQLQLENLLLDLQMILNGINNYKNPELTNMLTFKFYMPKKATELKHLQCLEEELKPLEEALNLAPSKNFHLRPRDLISNINVIVLELKGSETTFMCEYADETATIVEFLNRWITFSQSIISTLTGGGGSGGGGSGGGGSGGGGSESKYGPPCPPCPAPEFLGGPSVFLFPPKPKDTLMISRTPEVTCVVVDVSQEDPEVQFNWYVDGVEVHNAKTKPREEQFNSTYRVVSVLTVLHQDWLNGKEYKCKVSNKGLPSSIEKTISKAKGQPREPQVYTLPPSQEEMTKNQVSLTCLVKGFYPSDIAVEWESNGQPENNYKTTPPVLDSDGSFFLYSRLTVDKSRWQEGNVFSCSVMHEALHNHYTQKSLSLSLGK

SEQ ID NO: 246 - protein, 382 aa, Artificial Sequence
  source: /note="Description of Artificial Sequence: Synthetic polypeptide"
APTSSSTKKTQLQLEHLLLDLQMILNGINNYKNPKLTRMLTFKFYMPKKATELKHLQCLEEELKPLEEVLNLAQSKNFHLRPRDLISNINVIVLELKGSETTFMCEYADETATIVEFLNRWITFSQSIISTLTGGGGSGGGGSGGGGSGGGGSESKYGPPCPPCPAPEFLGGPSVFLFPPKPKDTLMISRTPEVTCVVVDVSQEDPEVQFNWYVDGVEVHNAKTKPREEQFNSTYRVVSVLTVLHQDWLNGKEYKCKVSNKGLPSSIEKTISKAKGQPREPQVYTLPPSQEEMTKNQVSLTCLVKGFYPSDIAVEWESNGQPENNYKTTPPVLDSDGSFFLYSKLTVDKSRWQEGNVFSCSVMHEALHNHYTQKSLSLSLGK

SEQ ID NO: 247 - protein, 382 aa, Artificial Sequence
  source: /note="Description of Artificial Sequence: Synthetic polypeptide"
APTSSSTKKTQLQLEHLLLDLQMILNGINNYKNPKLTRMLTFKFYMPKKATELKHLQCLEEELKPLEEALNLAPSKNFHLRPRDLISNINVIVLELKGSETTFMCEYADETATIVEFLNRWITFSQSIISTLTGGGGSGGGGSGGGGSGGGGSESKYGPPCPPCPAPEFLGGPSVFLFPPKPKDTLMISRTPEVTCVVVDVSQEDPEVQFNWYVDGVEVHNAKTKPREEQFNSTYRVVSVLTVLHQDWLNGKEYKCKVSNKGLPSSIEKTISKAKGQPREPQVYTLPPSQEEMTKNQVSLTCLVKGFYPSDIAVEWESNGQPENNYKTTPPVLDSDGSFFLYSKLTVDKSRWQEGNVFSCSVMHEALHNHYTQKSLSLSLGK

SEQ ID NO: 248 - protein, 382 aa, Artificial Sequence
  source: /note="Description of Artificial Sequence: Synthetic polypeptide"
APTSSSTKKTQLQLEDLLLDLQMILNGINNYKNPKLTRMLTFKFYMPKKATELKHLQCLEEELKPLEEALNLAPSKNFHLRPRDLISNINVIVLELKGSETTFMCEYADETATIVEFLNRWITFSQSIISTLTGGGGSGGGGSGGGGSGGGGSESKYGPPCPPCPAPEFLGGPSVFLFPPKPKDTLMISRTPEVTCVVVDVSQEDPEVQFNWYVDGVEVHNAKTKPREEQFNSTYRVVSVLTVLHQDWLNGKEYKCKVSNKGLPSSIEKTISKAKGQPREPQVYTLPPSQEEMTKNQVSLTCLVKGFYPSDIAVEWESNGQPENNYKTTPPVLDSDGSFFLYSKLTVDKSRWQEGNVFSCSVMHEALHNHYTQKSLSLSLGK

SEQ ID NO: 249 - protein, 382 aa, Artificial Sequence
  source: /note="Description of Artificial Sequence: Synthetic polypeptide"
APTSSSTKKTQLQLENLLLDLQMILNGINNYKNPKLTRMLTFKFYMPKKATELKHLQCLEEELKPLEEALNLAPSKNFHLRPRDLISNINVIVLELKGSETTFMCEYADETATIVEFLNRWITFSQSIISTLTGGGGSGGGGSGGGGSGGGGSESKYGPPCPPCPAPEFLGGPSVFLFPPKPKDTLMISRTPEVTCVVVDVSQEDPEVQFNWYVDGVEVHNAKTKPREEQFNSTYRVVSVLTVLHQDWLNGKEYKCKVSNKGLPSSIEKTISKAKGQPREPQVYTLPPSQEEMTKNQVSLTCLVKGFYPSDIAVEWESNGQPENNYKTTPPVLDSDGSFFLYSKLTVDKSRWQEGNVFSCSVMHEALHNHYTQKSLSLSLGK

SEQ ID NO: 250 - protein, 382 aa, Artificial Sequence
  source: /note="Description of Artificial Sequence: Synthetic polypeptide"
APTSSSTKKTQLQLELLLLDLQMILNGINNYKNPKLTRMLTFKFYMPKKATELKHLQCLEEELKPLEEALNLAPSKNFHLRPRDLISNINVIVLELKGSETTFMCEYADETATIVEFLNRWITFSQSIISTLTGGGGSGGGGSGGGGSGGGGSESKYGPPCPPCPAPEFLGGPSVFLFPPKPKDTLMISRTPEVTCVVVDVSQEDPEVQFNWYVDGVEVHNAKTKPREEQFNSTYRVVSVLTVLHQDWLNGKEYKCKVSNKGLPSSIEKTISKAKGQPREPQVYTLPPSQEEMTKNQVSLTCLVKGFYPSDIAVEWESNGQPENNYKTTPPVLDSDGSFFLYSKLTVDKSRWQEGNVFSCSVMHEALHNHYTQKSLSLSLGK

SEQ ID NO: 251 - protein, 382 aa, Artificial Sequence
  source: /note="Description of Artificial Sequence: Synthetic polypeptide"
APTSSSTKKTQLQLEHLLLDLQMILNGTNNYKNPKLTRMLTFKFYMPKKATELKHLQCLEEELKPLEEALNLAPSKNFHLRPRDLISNINVIVLELKGSETTFMCEYADETATIVEFLNRWITFSQSIISTLTGGGGSGGGGSGGGGSGGGGSESKYGPPCPPCPAPEFLGGPSVFLFPPKPKDTLMISRTPEVTCVVVDVSQEDPEVQFNWYVDGVEVHNAKTKPREEQFNSTYRVVSVLTVLHQDWLNGKEYKCKVSNKGLPSSIEKTISKAKGQPREPQVYTLPPSQEEMTKNQVSLTCLVKGFYPSDIAVEWESNGQPENNYKTTPPVLDSDGSFFLYSKLTVDKSRWQEGNVFSCSVMHEALHNHYTQKSLSLSLGK

SEQ ID NO: 252 - protein, 382 aa, Artificial Sequence
  source: /note="Description of Artificial Sequence: Synthetic polypeptide"
APTSSSTKKTQLQLEHLLLDLQMILNGINNYKNPKLTRMLTFKFYMPKKATELKHLQCLEEELKPLEEALNLAPSKNFHLRPRVLISNINVIVLELKGSETTFMCEYADETATIVEFLNRWITFSQSIISTLTGGGGSGGGGSGGGGSGGGGSESKYGPPCPPCPAPEFLGGPSVFLFPPKPKDTLMISRTPEVTCVVVDVSQEDPEVQFNWYVDGVEVHNAKTKPREEQFNSTYRVVSVLTVLHQDWLNGKEYKCKVSNKGLPSSIEKTISKAKGQPREPQVYTLPPSQEEMTKNQVSLTCLVKGFYPSDIAVEWESNGQPENNYKTTPPVLDSDGSFFLYSKLTVDKSRWQEGNVFSCSVMHEALHNHYTQKSLSLSLGK

SEQ ID NO: 253 - protein, 382 aa, Artificial Sequence
  source: /note="Description of Artificial Sequence: Synthetic polypeptide"
APTSSSTKKTQLQLEHLLLDLQMILNGINNYKNPKLTRMLTFKFYMPKKATELKHLQCLEEELKPLEEALNLAPSKNFHLRPRDLIRNINVIVLELKGSETTFMCEYADETATIVEFLNRWITFSQSIISTLTGGGGSGGGGSGGGGSGGGGSESKYGPPCPPCPAPEFLGGPSVFLFPPKPKDTLMISRTPEVTCVVVDVSQEDPEVQFNWYVDGVEVHNAKTKPREEQFNSTYRVVSVLTVLHQDWLNGKEYKCKVSNKGLPSSIEKTISKAKGQPREPQVYTLPPSQEEMTKNQVSLTCLVKGFYPSDIAVEWESNGQPENNYKTTPPVLDSDGSFFLYSKLTVDKSRWQEGNVFSCSVMHEALHNHYTQKSLSLSLGK

SEQ ID NO: 254 - protein, 382 aa, Artificial Sequence
  source: /note="Description of Artificial Sequence: Synthetic polypeptide"
APTSSSTKKTQLQLEHLLLDLQMILNGINNYKNPKLTRMLTFKFYMPKKATELKHLQCLEEELKPLEEALNLAPSKNFHLRPRDLISLINVIVLELKGSETTFMCEYADETATIVEFLNRWITFSQSIISTLTGGGGSGGGGSGGGGSGGGGSESKYGPPCPPCPAPEFLGGPSVFLFPPKPKDTLMISRTPEVTCVVVDVSQEDPEVQFNWYVDGVEVHNAKTKPREEQFNSTYRVVSVLTVLHQDWLNGKEYKCKVSNKGLPSSIEKTISKAKGQPREPQVYTLPPSQEEMTKNQVSLTCLVKGFYPSDIAVEWESNGQPENNYKTTPPVLDSDGSFFLYSKLTVDKSRWQEGNVFSCSVMHEALHNHYTQKSLSLSLGK

SEQ ID NO: 255 - protein, 382 aa, Artificial Sequence
  source: /note="Description of Artificial Sequence: Synthetic polypeptide"
APTSSSTKKTQLQLEHLLLDLQMILNGINNYKNPKLTRMLTFKFYMPKKATELKHLQCLEEELKPLEEALNLAPSKNFHLRPRDLISSINVIVLELKGSETTFMCEYADETATIVEFLNRWITFSQSIISTLTGGGGSGGGGSGGGGSGGGGSESKYGPPCPPCPAPEFLGGPSVFLFPPKPKDTLMISRTPEVTCVVVDVSQEDPEVQFNWYVDGVEVHNAKTKPREEQFNSTYRVVSVLTVLHQDWLNGKEYKCKVSNKGLPSSIEKTISKAKGQPREPQVYTLPPSQEEMTKNQVSLTCLVKGFYPSDIAVEWESNGQPENNYKTTPPVLDSDGSFFLYSKLTVDKSRWQEGNVFSCSVMHEALHNHYTQKSLSLSLGK

SEQ ID NO: 256 - protein, 382 aa, Artificial Sequence
  source: /note="Description of Artificial Sequence: Synthetic polypeptide"
APTSSSTKKTQLQLEHLLLDLQMILNGINNYKNPKLTRMLTFKFYMPKKATELKHLQCLEEELKPLEEALNLAPSKNFHLRPRDLISNINVSVLELKGSETTFMCEYADETATIVEFLNRWITFSQSIISTLTGGGGSGGGGSGGGGSGGGGSESKYGPPCPPCPAPEFLGGPSVFLFPPKPKDTLMISRTPEVTCVVVDVSQEDPEVQFNWYVDGVEVHNAKTKPREEQFNSTYRVVSVLTVLHQDWLNGKEYKCKVSNKGLPSSIEKTISKAKGQPREPQVYTLPPSQEEMTKNQVSLTCLVKGFYPSDIAVEWESNGQPENNYKTTPPVLDSDGSFFLYSKLTVDKSRWQEGNVFSCSVMHEALHNHYTQKSLSLSLGK

SEQ ID NO: 257 - protein, 382 aa, Artificial Sequence
  source: /note="Description of Artificial Sequence: Synthetic polypeptide"
APTSSSTKKTQLQLEHLLLDLQMILNGINNYKNPELTRMLTFKFYMPKKATELKHLQCLEEELKPLEEALNLAPSKNFHLRPRDLISNINVIVLELKGSETTFMCEYADETATIVEFLNRWITFSQSIISTLTGGGGSGGGGSGGGGSGGGGSESKYGPPCPPCPAPEFLGGPSVFLFPPKPKDTLMISRTPEVTCVVVDVSQEDPEVQFNWYVDGVEVHNAKTKPREEQFNSTYRVVSVLTVLHQDWLNGKEYKCKVSNKGLPSSIEKTISKAKGQPREPQVYTLPPSQEEMTKNQVSLTCLVKGFYPSDIAVEWESNGQPENNYKTTPPVLDSDGSFFLYSKLTVDKSRWQEGNVFSCSVMHEALHNHYTQKSLSLSLGK

SEQ ID NO: 258 - protein, 382 aa, Artificial Sequence
  source: /note="Description of Artificial Sequence: Synthetic polypeptide"
APTSSSTKKTQLQLENLLLDLQMILNGINNYKNPELTRMLTFKFYMPKKATELKHLQCLEEELKPLEEALNLAPSKNFHLRPRDLISNINVIVLELKGSETTFMCEYADETATIVEFLNRWITFSQSIISTLTGGGGSGGGGSGGGGSGGGGSESKYGPPCPPCPAPEFLGGPSVFLFPPKPKDTLMISRTPEVTCVVVDVSQEDPEVQFNWYVDGVEVHNAKTKPREEQFNSTYRVVSVLTVLHQDWLNGKEYKCKVSNKGLPSSIEKTISKAKGQPREPQVYTLPPSQEEMTKNQVSLTCLVKGFYPSDIAVEWESNGQPENNYKTTPPVLDSDGSFFLYSKLTVDKSRWQEGNVFSCSVMHEALHNHYTQKSLSLSLGK

SEQ ID NO: 259 - protein, 382 aa, Artificial Sequence
  source: /note="Description of Artificial Sequence: Synthetic polypeptide"
APTSSSTKKTQLQLELLLLDLQMILNGINNYKNPELTRMLTFKFYMPKKATELKHLQCLEEELKPLEEALNLAPSKNFHLRPRDLISNINVIVLELKGSETTFMCEYADETATIVEFLNRWITFSQSIISTLTGGGGSGGGGSGGGGSGGGGSESKYGPPCPPCPAPEFLGGPSVFLFPPKPKDTLMISRTPEVTCVVVDVSQEDPEVQFNWYVDGVEVHNAKTKPREEQFNSTYRVVSVLTVLHQDWLNGKEYKCKVSNKGLPSSIEKTISKAKGQPREPQVYTLPPSQEEMTKNQVSLTCLVKGFYPSDIAVEWESNGQPENNYKTTPPVLDSDGSFFLYSKLTVDKSRWQEGNVFSCSVMHEALHNHYTQKSLSLSLGK

SEQ ID NO: 260 - protein, 382 aa, Artificial Sequence
  source: /note="Description of Artificial Sequence: Synthetic polypeptide"
APTSSSTKKTQLQLEHLLLDLQMILNGINNYKNPELTRMLTFKFYMPKKATELKHLQCLEEELKPLEEALNLAPSKNFHLRPRVLISNINVIVLELKGSETTFMCEYADETATIVEFLNRWITFSQSIISTLTGGGGSGGGGSGGGGSGGGGSESKYGPPCPPCPAPEFLGGPSVFLFPPKPKDTLMISRTPEVTCVVVDVSQEDPEVQFNWYVDGVEVHNAKTKPREEQFNSTYRVVSVLTVLHQDWLNGKEYKCKVSNKGLPSSIEKTISKAKGQPREPQVYTLPPSQEEMTKNQVSLTCLVKGFYPSDIAVEWESNGQPENNYKTTPPVLDSDGSFFLYSKLTVDKSRWQEGNVFSCSVMHEALHNHYTQKSLSLSLGK

SEQ ID NO: 261 - protein, 382 aa, Artificial Sequence
  source: /note="Description of Artificial Sequence: Synthetic polypeptide"
APTSSSTKKTQLQLEHLLLDLQMILNGINNYKNPELTRMLTFKFYMPKKATELKHLQCLEEELKPLEEALNLAPSKNFHLRPRDLISNINVSVLELKGSETTFMCEYADETATIVEFLNRWITFSQSIISTLTGGGGSGGGGSGGGGSGGGGSESKYGPPCPPCPAPEFLGGPSVFLFPPKPKDTLMISRTPEVTCVVVDVSQEDPEVQFNWYVDGVEVHNAKTKPREEQFNSTYRVVSVLTVLHQDWLNGKEYKCKVSNKGLPSSIEKTISKAKGQPREPQVYTLPPSQEEMTKNQVSLTCLVKGFYPSDIAVEWESNGQPENNYKTTPPVLDSDGSFFLYSKLTVDKSRWQEGNVFSCSVMHEALHNHYTQKSLSLSLGK

SEQ ID NO: 262 - protein, 382 aa, Artificial Sequence
  source: /note="Description of Artificial Sequence: Synthetic polypeptide"
APTSSSTKKTQLQLEHLLLDLQMILNGINNYKNPKLTQMLTFKFYMPKKATELKHLQCLEEELKPLEEALNLAPSKNFHLRPRDLISNINVIVLELKGSETTFMCEYADETATIVEFLNRWITFSQSIISTLTGGGGSGGGGSGGGGSGGGGSESKYGPPCPPCPAPEFLGGPSVFLFPPKPKDTLMISRTPEVTCVVVDVSQEDPEVQFNWYVDGVEVHNAKTKPREEQFNSTYRVVSVLTVLHQDWLNGKEYKCKVSNKGLPSSIEKTISKAKGQPREPQVYTLPPSQEEMTKNQVSLTCLVKGFYPSDIAVEWESNGQPENNYKTTPPVLDSDGSFFLYSKLTVDKSRWQEGNVFSCSVMHEALHNHYTQKSLSLSLGK

SEQ ID NO: 263 - protein, 382 aa, Artificial Sequence
  source: /note="Description of Artificial Sequence: Synthetic polypeptide"
APTSSSTKKTQLQLENLLLDLQMILNGINNYKNPKLTQMLTFKFYMPKKATELKHLQCLEEELKPLEEALNLAPSKNFHLRPRDLISNINVIVLELKGSETTFMCEYADETATIVEFLNRWITFSQSIISTLTGGGGSGGGGSGGGGSGGGGSESKYGPPCPPCPAPEFLGGPSVFLFPPKPKDTLMISRTPEVTCVVVDVSQEDPEVQFNWYVDGVEVHNAKTKPREEQFNSTYRVVSVLTVLHQDWLNGKEYKCKVSNKGLPSSIEKTISKAKGQPREPQVYTLPPSQEEMTKNQVSLTCLVKGFYPSDIAVEWESNGQPENNYKTTPPVLDSDGSFFLYSKLTVDKSRWQEGNVFSCSVMHEALHNHYTQKSLSLSLGK

SEQ ID NO: 264 - protein, 382 aa, Artificial Sequence
  source: /note="Description of Artificial Sequence: Synthetic polypeptide"
APTSSSTKKTQLQLELLLLDLQMILNGINNYKNPKLTQMLTFKFYMPKKATELKHLQCLEEELKPLEEALNLAPSKNFHLRPRDLISNINVIVLELKGSETTFMCEYADETATIVEFLNRWITFSQSIISTLTGGGGSGGGGSGGGGSGGGGSESKYGPPCPPCPAPEFLGGPSVFLFPPKPKDTLMISRTPEVTCVVVDVSQEDPEVQFNWYVDGVEVHNAKTKPREEQFNSTYRVVSVLTVLHQDWLNGKEYKCKVSNKGLPSSIEKTISKAKGQPREPQVYTLPPSQEEMTKNQVSLTCLVKGFYPSDIAVEWESNGQPENNYKTTPPVLDSDGSFFLYSKLTVDKSRWQEGNVFSCSVMHEALHNHYTQKSLSLSLGK

SEQ ID NO: 265 - protein, 382 aa, Artificial Sequence
  source: /note="Description of Artificial Sequence: Synthetic polypeptide"
APTSSSTKKTQLQLEHLLLDLQMILNGINNYKNPKLTQMLTFKFYMPKKATELKHLQCLEEELKPLEEALNLAPSKNFHLRPRVLISNINVIVLELKGSETTFMCEYADETATIVEFLNRWITFSQSIISTLTGGGGSGGGGSGGGGSGGGGSESKYGPPCPPCPAPEFLGGPSVFLFPPKPKDTLMISRTPEVTCVVVDVSQEDPEVQFNWYVDGVEVHNAKTKPREEQFNSTYRVVSVLTVLHQDWLNGKEYKCKVSNKGLPSSIEKTISKAKGQPREPQVYTLPPSQEEMTKNQVSLTCLVKGFYPSDIAVEWESNGQPENNYKTTPPVLDSDGSFFLYSKLTVDKSRWQEGNVFSCSVMHEALHNHYTQKSLSLSLGK

SEQ ID NO: 266 - protein, 382 aa, Artificial Sequence
  source: /note="Description of Artificial Sequence: Synthetic polypeptide"
APTSSSTKKTQLQLEHLLLDLQMILNGINNYKNPKLTQMLTFKFYMPKKATELKHLQCLEEELKPLEEALNLAPSKNFHLRPRDLISNINVSVLELKGSETTFMCEYADETATIVEFLNRWITFSQSIISTLTGGGGSGGGGSGGGGSGGGGSESKYGPPCPPCPAPEFLGGPSVFLFPPKPKDTLMISRTPEVTCVVVDVSQEDPEVQFNWYVDGVEVHNAKTKPREEQFNSTYRVVSVLTVLHQDWLNGKEYKCKVSNKGLPSSIEKTISKAKGQPREPQVYTLPPSQEEMTKNQVSLTCLVKGFYPSDIAVEWESNGQPENNYKTTPPVLDSDGSFFLYSKLTVDKSRWQEGNVFSCSVMHEALHNHYTQKSLSLSLGK

SEQ ID NO: 267 - protein, 382 aa, Artificial Sequence
  source: /note="Description of Artificial Sequence: Synthetic polypeptide"
APTSSSTKKTQLQLEHLLLDLQMILNGINNYKNPKLTNMLTFKFYMPKKATELKHLQCLEEELKPLEEALNLAPSKNFHLRPRDLISNINVIVLELKGSETTFMCEYADETATIVEFLNRWITFSQSIISTLTGGGGSGGGGSGGGGSGGGGSESKYGPPCPPCPAPEFLGGPSVFLFPPKPKDTLMISRTPEVTCVVVDVSQEDPEVQFNWYVDGVEVHNAKTKPREEQFNSTYRVVSVLTVLHQDWLNGKEYKCKVSNKGLPSSIEKTISKAKGQPREPQVYTLPPSQEEMTKNQVSLTCLVKGFYPSDIAVEWESNGQPENNYKTTPPVLDSDGSFFLYSKLTVDKSRWQEGNVFSCSVMHEALHNHYTQKSLSLSLGK

SEQ ID NO: 268 - protein, 382 aa, Artificial Sequence
  source: /note="Description of Artificial Sequence: Synthetic polypeptide"
APTSSSTKKTQLQLENLLLDLQMILNGINNYKNPKLTNMLTFKFYMPKKATELKHLQCLEEELKPLEEALNLAPSKNFHLRPRDLISNINVIVLELKGSETTFMCEYADETATIVEFLNRWITFSQSIISTLTGGGGSGGGGSGGGGSGGGGSESKYGPPCPPCPAPEFLGGPSVFLFPPKPKDTLMISRTPEVTCVVVDVSQEDPEVQFNWYVDGVEVHNAKTKPREEQFNSTYRVVSVLTVLHQDWLNGKEYKCKVSNKGLPSSIEKTISKAKGQPREPQVYTLPPSQEEMTKNQVSLTCLVKGFYPSDIAVEWESNGQPENNYKTTPPVLDSDGSFFLYSKLTVDKSRWQEGNVFSCSVMHEALHNHYTQKSLSLSLGK

SEQ ID NO: 269 - protein, 382 aa, Artificial Sequence
  source: /note="Description of Artificial Sequence: Synthetic polypeptide"
APTSSSTKKTQLQLELLLLDLQMILNGINNYKNPKLTNMLTFKFYMPKKATELKHLQCLEEELKPLEEALNLAPSKNFHLRPRDLISNINVIVLELKGSETTFMCEYADETATIVEFLNRWITFSQSIISTLTGGGGSGGGGSGGGGSGGGGSESKYGPPCPPCPAPEFLGGPSVFLFPPKPKDTLMISRTPEVTCVVVDVSQEDPEVQFNWYVDGVEVHNAKTKPREEQFNSTYRVVSVLTVLHQDWLNGKEYKCKVSNKGLPSSIEKTISKAKGQPREPQVYTLPPSQEEMTKNQVSLTCLVKGFYPSDIAVEWESNGQPENNYKTTPPVLDSDGSFFLYSKLTVDKSRWQEGNVFSCSVMHEALHNHYTQKSLSLSLGK

SEQ ID NO: 270 - protein, 382 aa, Artificial Sequence
  source: /note="Description of Artificial Sequence: Synthetic polypeptide"
APTSSSTKKTQLQLEHLLLDLQMILNGINNYKNPKLTNMLTFKFYMPKKATELKHLQCLEEELKPLEEALNLAPSKNFHLRPRVLISNINVIVLELKGSETTFMCEYADETATIVEFLNRWITFSQSIISTLTGGGGSGGGGSGGGGSGGGGSESKYGPPCPPCPAPEFLGGPSVFLFPPKPKDTLMISRTPEVTCVVVDVSQEDPEVQFNWYVDGVEVHNAKTKPREEQFNSTYRVVSVLTVLHQDWLNGKEYKCKVSNKGLPSSIEKTISKAKGQPREPQVYTLPPSQEEMTKNQVSLTCLVKGFYPSDIAVEWESNGQPENNYKTTPPVLDSDGSFFLYSKLTVDKSRWQEGNVFSCSVMHEALHNHYTQKSLSLSLGK

SEQ ID NO: 271 - protein, 382 aa, Artificial Sequence
  source: /note="Description of Artificial Sequence: Synthetic polypeptide"
APTSSSTKKTQLQLEHLLLDLQMILNGINNYKNPKLTNMLTFKFYMPKKATELKHLQCLEEELKPLEEALNLAPSKNFHLRPRDLISNINVSVLELKGSETTFMCEYADETATIVEFLNRWITFSQSIISTLTGGGGSGGGGSGGGGSGGGGSESKYGPPCPPCPAPEFLGGPSVFLFPPKPKDTLMISRTPEVTCVVVDVSQEDPEVQFNWYVDGVEVHNAKTKPREEQFNSTYRVVSVLTVLHQDWLNGKEYKCKVSNKGLPSSIEKTISKAKGQPREPQVYTLPPSQEEMTKNQVSLTCLVKGFYPSDIAVEWESNGQPENNYKTTPPVLDSDGSFFLYSKLTVDKSRWQEGNVFSCSVMHEALHNHYTQKSLSLSLGK

SEQ ID NO: 272 - protein, 382 aa, Artificial Sequence
  source: /note="Description of Artificial Sequence: Synthetic polypeptide"
APTSSSTKKTQLQLEHLLLDLQMILNGINNYKNPKLTEMLTFKFYMPKKATELKHLQCLEEELKPLEEALNLAPSKNFHLRPRDLISNINVIVLELKGSETTFMCEYADETATIVEFLNRWITFSQSIISTLTGGGGSGGGGSGGGGSGGGGSESKYGPPCPPCPAPEFLGGPSVFLFPPKPKDTLMISRTPEVTCVVVDVSQEDPEVQFNWYVDGVEVHNAKTKPREEQFNSTYRVVSVLTVLHQDWLNGKEYKCKVSNKGLPSSIEKTISKAKGQPREPQVYTLPPSQEEMTKNQVSLTCLVKGFYPSDIAVEWESNGQPENNYKTTPPVLDSDGSFFLYSKLTVDKSRWQEGNVFSCSVMHEALHNHYTQKSLSLSLGK

SEQ ID NO: 273 - protein, 382 aa, Artificial Sequence
  source: /note="Description of Artificial Sequence: Synthetic polypeptide"
APTSSSTKKTQLQLEHLLLDLQMILNGINNYKNPKLTRMLTKKFYMPKKATELKHLQCLEEELKPLEEALNLAPSKNFHLRPRDLISNINVIVLELKGSETTFMCEYADETATIVEFLNRWITFSQSIISTLTGGGGSGGGGSGGGGSGGGGSESKYGPPCPPCPAPEFLGGPSVFLFPPKPKDTLMISRTPEVTCVVVDVSQEDPEVQFNWYVDGVEVHNAKTKPREEQFNSTYRVVSVLTVLHQDWLNGKEYKCKVSNKGLPSSIEKTISKAKGQPREPQVYTLPPSQEEMTKNQVSLTCLVKGFYPSDIAVEWESNGQPENNYKTTPPVLDSDGSFFLYSKLTVDKSRWQEGNVFSCSVMHEALHNHYTQKSLSLSLGK

SEQ ID NO: 274 - protein, 382 aa, Artificial Sequence
  source: /note="Description of Artificial Sequence: Synthetic polypeptide"
APTSSSTKKTQLQLEHLLLDLQMILNGINNYKNPKLTRMLTQKFYMPKKATELKHLQCLEEELKPLEEALNLAPSKNFHLRPRDLISNINVIVLELKGSETTFMCEYADETATIVEFLNRWITFSQSIISTLTGGGGSGGGGSGGGGSGGGGSESKYGPPCPPCPAPEFLGGPSVFLFPPKPKDTLMISRTPEVTCVVVDVSQEDPEVQFNWYVDGVEVHNAKTKPREEQFNSTYRVVSVLTVLHQDWLNGKEYKCKVSNKGLPSSIEKTISKAKGQPREPQVYTLPPSQEEMTKNQVSLTCLVKGFYPSDIAVEWESNGQPENNYKTTPPVLDSDGSFFLYSKLTVDKSRWQEGNVFSCSVMHEALHNHYTQKSLSLSLGK

SEQ ID NO: 275 - protein, 382 aa, Artificial Sequence
  source: /note="Description of Artificial Sequence: Synthetic polypeptide"
APTSSSTKKTQLQLEHLLLDLQMILNGINNYKNPKLTRMLTAKFAMPKKATELKHLQCLEEELKPLEEALNGAPSKNFHLRPRDLISDINVIVLELKGSETTFMCEYADETATIVEFLNRWITFSQSIISTLTGGGGSGGGGSGGGGSGGGGSESKYGPPCPPCPAPEFLGGPSVFLFPPKPKDTLMISRTPEVTCVVVDVSQEDPEVQFNWYVDGVEVHNAKTKPREEQFNSTYRVVSVLTVLHQDWLNGKEYKCKVSNKGLPSSIEKTISKAKGQPREPQVYTLPPSQEEMTKNQVSLTCLVKGFYPSDIAVEWESNGQPENNYKTTPPVLDSDGSFFLYSKLTVDKSRWQEGNVFSCSVMHEALHNHYTQKSLSLSLGK

SEQ ID NO: 276 - protein, 382 aa, Artificial Sequence
  source: /note="Description of Artificial Sequence: Synthetic polypeptide"
APTSSSTKKTQLQLEHLLLDLQMILNGINNYKNPKLTNMLTFKFYMPKKATELKHLQCLEEELKPLEEALNLAPSKNFHLRPRDLIRNINVIVLELKGSETTFMCEYADETATIVEFLNRWITFSQSIISTLTGGGGSGGGGSGGGGSGGGGSESKYGPPCPPCPAPEFLGGPSVFLFPPKPKDTLMISRTPEVTCVVVDVSQEDPEVQFNWYVDGVEVHNAKTKPREEQFNSTYRVVSVLTVLHQDWLNGKEYKCKVSNKGLPSSIEKTISKAKGQPREPQVYTLPPSQEEMTKNQVSLTCLVKGFYPSDIAVEWESNGQPENNYKTTPPVLDSDGSFFLYSKLTVDKSRWQEGNVFSCSVMHEALHNHYTQKSLSLSLGK

SEQ ID NO: 277 - protein, 382 aa, Artificial Sequence
  source: /note="Description of Artificial Sequence: Synthetic polypeptide"
APTSSSTKKTQLQLENLLLDLQMILNGINNYKNPKLTEMLTFKFYMPKKATELKHLQCLEEELKPLEEALNLAPSKNFHLRPRDLISNINVIVLELKGSETTFMCEYADETATIVEFLNRWITFSQSIISTLTGGGGSGGGGSGGGGSGGGGSESKYGPPCPPCPAPEFLGGPSVFLFPPKPKDTLMISRTPEVTCVVVDVSQEDPEVQFNWYVDGVEVHNAKTKPREEQFNSTYRVVSVLTVLHQDWLNGKEYKCKVSNKGLPSSIEKTISKAKGQPREPQVYTLPPSQEEMTKNQVSLTCLVKGFYPSDIAVEWESNGQPENNYKTTPPVLDSDGSFFLYSKLTVDKSRWQEGNVFSCSVMHEALHNHYTQKSLSLSLGK

SEQ ID NO: 278 - protein, 382 aa, Artificial Sequence
  source: /note="Description of Artificial Sequence: Synthetic polypeptide"
APTSSSTKKTQLQLEHLLLDLQMILNGINNYKNPKLTEMLTFKFYMPKKATELKHLQCLEEELKPLEEALNLAPSKNFHLRPRVLISNINVIVLELKGSETTFMCEYADETATIVEFLNRWITFSQSIISTLTGGGGSGGGGSGGGGSGGGGSESKYGPPCPPCPAPEFLGGPSVFLFPPKPKDTLMISRTPEVTCVVVDVSQEDPEVQFNWYVDGVEVHNAKTKPREEQFNSTYRVVSVLTVLHQDWLNGKEYKCKVSNKGLPSSIEKTISKAKGQPREPQVYTLPPSQEEMTKNQVSLTCLVKGFYPSDIAVEWESNGQPENNYKTTPPVLDSDGSFFLYSKLTVDKSRWQEGNVFSCSVMHEALHNHYTQKSLSLSLGK

SEQ ID NO: 279 - protein, 382 aa, Artificial Sequence
  source: /note="Description of Artificial Sequence: Synthetic polypeptide"
APTSSSTKKTQLQLEHLLLDLQMILNGINNYKNPKLTEMLTFKFYMPKKATELKHLQCLEEELKPLEEALNLAPSKNFHLRPRDLIRNINVIVLELKGSETTFMCEYADETATIVEFLNRWITFSQSIISTLTGGGGSGGGGSGGGGSGGGGSESKYGPPCPPCPAPEFLGGPSVFLFPPKPKDTLMISRTPEVTCVVVDVSQEDPEVQFNWYVDGVEVHNAKTKPREEQFNSTYRVVSVLTVLHQDWLNGKEYKCKVSNKGLPSSIEKTISKAKGQPREPQVYTLPPSQEEMTKNQVSLTCLVKGFYPSDIAVEWESNGQPENNYKTTPPVLDSDGSFFLYSKLTVDKSRWQEGNVFSCSVMHEALHNHYTQKSLSLSLGK

SEQ ID NO: 280 - protein, 382 aa, Artificial Sequence
  source: /note="Description of Artificial Sequence: Synthetic polypeptide"
APTSSSTKKTQLQLEHLLLDLQMILNGINNYKNPKLTEMLTFKFYMPKKATELKHLQCLEEELKPLEEALNLAPSKNFHLRPRDLISNINVSVLELKGSETTFMCEYADETATIVEFLNRWITFSQSIISTLTGGGGSGGGGSGGGGSGGGGSESKYGPPCPPCPAPEFLGGPSVFLFPPKPKDTLMISRTPEVTCVVVDVSQEDPEVQFNWYVDGVEVHNAKTKPREEQFNSTYRVVSVLTVLHQDWLNGKEYKCKVSNKGLPSSIEKTISKAKGQPREPQVYTLPPSQEEMTKNQVSLTCLVKGFYPSDIAVEWESNGQPENNYKTTPPVLDSDGSFFLYSKLTVDKSRWQEGNVFSCSVMHEALHNHYTQKSLSLSLGK

SEQ ID NO: 281 - protein, 382 aa, Artificial Sequence
  source: /note="Description of Artificial Sequence: Synthetic polypeptide"
APTSSSTKKTQLQLENLLLDLQMILNGINNYKNPKLTRMLTQKFYMPKKATELKHLQCLEEELKPLEEALNLAPSKNFHLRPRDLISNINVIVLELKGSETTFMCEYADETATIVEFLNRWITFSQSIISTLTGGGGSGGGGSGGGGSGGGGSESKYGPPCPPCPAPEFLGGPSVFLFPPKPKDTLMISRTPEVTCVVVDVSQEDPEVQFNWYVDGVEVHNAKTKPREEQFNSTYRVVSVLTVLHQDWLNGKEYKCKVSNKGLPSSIEKTISKAKGQPREPQVYTLPPSQEEMTKNQVSLTCLVKGFYPSDIAVEWESNGQPENNYKTTPPVLDSDGSFFLYSKLTVDKSRWQEGNVFSCSVMHEALHNHYTQKSLSLSLGK

SEQ ID NO: 282 - protein, 382 aa, Artificial Sequence
  source: /note="Description of Artificial Sequence: Synthetic polypeptide"
APTSSSTKKTQLQLEHLLLDLQMILNGINNYKNPKLTRMLTQKFYMPKKATELKHLQCLEEELKPLEEALNLAPSKNFHLRPRDLISNINVSVLELKGSETTFMCEYADETATIVEFLNRWITFSQSIISTLTGGGGSGGGGSGGGGSGGGGSESKYGPPCPPCPAPEFLGGPSVFLFPPKPKDTLMISRTPEVTCVVVDVSQEDPEVQFNWYVDGVEVHNAKTKPREEQFNSTYRVVSVLTVLHQDWLNGKEYKCKVSNKGLPSSIEKTISKAKGQPREPQVYTLPPSQEEMTKNQVSLTCLVKGFYPSDIAVEWESNGQPENNYKTTPPVLDSDGSFFLYSKLTVDKSRWQEGNVFSCSVMHEALHNHYTQKSLSLSLGK

SEQ ID NO: 283 - protein, 382 aa, Artificial Sequence
  source: /note="Description of Artificial Sequence: Synthetic polypeptide"
APTSSSTKKTQLQLENLLLDLQMILNGINNYKNPELTNMLTFKFYMPKKATELKHLQCLEEELKPLEEALNLAPSKNFHLRPRDLISNINVIVLELKGSETTFMCEYADETATIVEFLNRWITFSQSIISTLTGGGGSGGGGSGGGGSGGGGSESKYGPPCPPCPAPEFLGGPSVFLFPPKPKDTLMISRTPEVTCVVVDVSQEDPEVQFNWYVDGVEVHNAKTKPREEQFNSTYRVVSVLTVLHQDWLNGKEYKCKVSNKGLPSSIEKTISKAKGQPREPQVYTLPPSQEEMTKNQVSLTCLVKGFYPSDIAVEWESNGQPENNYKTTPPVLDSDGSFFLYSKLTVDKSRWQEGNVFSCSVMHEALHNHYTQKSLSLSLGK

SEQ ID NO: 284 - protein, 382 aa, Artificial Sequence
  source: /note="Description of Artificial Sequence: Synthetic polypeptide"
APTSSSTKKTQLQLEHLLLDLQMILNGINNYKNPKLTRMLTFKFYMPKKATELKHLQCLEEELKPLEEVLNLAQSKNFHLRPRDLISNINVIVLELKGSETTFMCEYADETATIVEFLNRWITFSQSIISTLTGGGGSGGGGSGGGGSGGGGSESKYGPPCPPCPAPEFLGGPSVFLFPPKPKDTLMISRTPEVTCVVVDVSQEDPEVQFNWYVDGVEVHNAKTKPREEQFNSTYRVVSVLQVLHVDWLNGKEYKCKVSNKGLPSSIEKTISKAKGQPREPQVYTLPPSQEEMTKNQVSLTCLVKGFYPSDIVVEWESNGQPENNYKTTPPVLDSDGSFFLYSRLTVDKSRWQEGNVFSCSVMHEALHNHYTQKSLSLSLGK

SEQ ID NO: 285 - protein, 382 aa, Artificial Sequence
  source: /note="Description of Artificial Sequence: Synthetic polypeptide"
APTSSSTKKTQLQLEHLLLDLQMILNGINNYKNPKLTRMLTFKFYMPKKATELKHLQCLEEELKPLEEALNLAPSKNFHLRPRDLISNINVIVLELKGSETTFMCEYADETATIVEFLNRWITFSQSIISTLTGGGGSGGGGSGGGGSGGGGSESKYGPPCPPCPAPEFLGGPSVFLFPPKPKDTLMISRTPEVTCVVVDVSQEDPEVQFNWYVDGVEVHNAKTKPREEQFNSTYRVVSVLQVLHVDWLNGKEYKCKVSNKGLPSSIEKTISKAKGQPREPQVYTLPPSQEEMTKNQVSLTCLVKGFYPSDIVVEWESNGQPENNYKTTPPVLDSDGSFFLYSRLTVDKSRWQEGNVFSCSVMHEALHNHYTQKSLSLSLGK

SEQ ID NO: 286 - protein, 382 aa, Artificial Sequence
  source: /note="Description of Artificial Sequence: Synthetic polypeptide"
APTSSSTKKTQLQLEDLLLDLQMILNGINNYKNPKLTRMLTFKFYMPKKATELKHLQCLEEELKPLEEALNLAPSKNFHLRPRDLISNINVIVLELKGSETTFMCEYADETATIVEFLNRWITFSQSIISTLTGGGGSGGGGSGGGGSGGGGSESKYGPPCPPCPAPEFLGGPSVFLFPPKPKDTLMISRTPEVTCVVVDVSQEDPEVQFNWYVDGVEVHNAKTKPREEQFNSTYRVVSVLQVLHVDWLNGKEYKCKVSNKGLPSSIEKTISKAKGQPREPQVYTLPPSQEEMTKNQVSLTCLVKGFYPSDIVVEWESNGQPENNYKTTPPVLDSDGSFFLYSRLTVDKSRWQEGNVFSCSVMHEALHNHYTQKSLSLSLGK

SEQ ID NO: 287 - protein, 382 aa, Artificial Sequence
  source: /note="Description of Artificial Sequence: Synthetic polypeptide"
APTSSSTKKTQLQLENLLLDLQMILNGINNYKNPKLTRMLTFKFYMPKKATELKHLQCLEEELKPLEEALNLAPSKNFHLRPRDLISNINVIVLELKGSETTFMCEYADETATIVEFLNRWITFSQSIISTLTGGGGSGGGGSGGGGSGGGGSESKYGPPCPPCPAPEFLGGPSVFLFPPKPKDTLMISRTPEVTCVVVDVSQEDPEVQFNWYVDGVEVHNAKTKPREEQFNSTYRVVSVLQVLHVDWLNGKEYKCKVSNKGLPSSIEKTISKAKGQPREPQVYTLPPSQEEMTKNQVSLTCLVKGFYPSDIVVEWESNGQPENNYKTTPPVLDSDGSFFLYSRLTVDKSRWQEGNVFSCSVMHEALHNHYTQKSLSLSLGK

SEQ ID NO: 288 - protein, 382 aa, Artificial Sequence
  source: /note="Description of Artificial Sequence: Synthetic polypeptide"
APTSSSTKKTQLQLELLLLDLQMILNGINNYKNPKLTRMLTFKFYMPKKATELKHLQCLEEELKPLEEALNLAPSKNFHLRPRDLISNINVIVLELKGSETTFMCEYADETATIVEFLNRWITFSQSIISTLTGGGGSGGGGSGGGGSGGGGSESKYGPPCPPCPAPEFLGGPSVFLFPPKPKDTLMISRTPEVTCVVVDVSQEDPEVQFNWYVDGVEVHNAKTKPREEQFNSTYRVVSVLQVLHVDWLNGKEYKCKVSNKGLPSSIEKTISKAKGQPREPQVYTLPPSQEEMTKNQVSLTCLVKGFYPSDIVVEWESNGQPENNYKTTPPVLDSDGSFFLYSRLTVDKSRWQEGNVFSCSVMHEALHNHYTQKSLSLSLGK

SEQ ID NO: 289 - protein, 382 aa, Artificial Sequence
  source: /note="Description of Artificial Sequence: Synthetic polypeptide"
APTSSSTKKTQLQLEHLLLDLQMILNGTNNYKNPKLTRMLTFKFYMPKKATELKHLQCLEEELKPLEEALNLAPSKNFHLRPRDLISNINVIVLELKGSETTFMCEYADETATIVEFLNRWITFSQSIISTLTGGGGSGGGGSGGGGSGGGGSESKYGPPCPPCPAPEFLGGPSVFLFPPKPKDTLMISRTPEVTCVVVDVSQEDPEVQFNWYVDGVEVHNAKTKPREEQFNSTYRVVSVLQVLHVDWLNGKEYKCKVSNKGLPSSIEKTISKAKGQPREPQVYTLPPSQEEMTKNQVSLTCLVKGFYPSDIVVEWESNGQPENNYKTTPPVLDSDGSFFLYSRLTVDKSRWQEGNVFSCSVMHEALHNHYTQKSLSLSLGK

SEQ ID NO: 290 - protein, 382 aa, Artificial Sequence
  source: /note="Description of Artificial Sequence: Synthetic polypeptide"
APTSSSTKKTQLQLEHLLLDLQMILNGINNYKNPKLTRMLTFKFYMPKKATELKHLQCLEEELKPLEEALNLAPSKNFHLRPRVLISNINVIVLELKGSETTFMCEYADETATIVEFLNRWITFSQSIISTLTGGGGSGGGGSGGGGSGGGGSESKYGPPCPPCPAPEFLGGPSVFLFPPKPKDTLMISRTPEVTCVVVDVSQEDPEVQFNWYVDGVEVHNAKTKPREEQFNSTYRVVSVLQVLHVDWLNGKEYKCKVSNKGLPSSIEKTISKAKGQPREPQVYTLPPSQEEMTKNQVSLTCLVKGFYPSDIVVEWESNGQPENNYKTTPPVLDSDGSFFLYSRLTVDKSRWQEGNVFSCSVMHEALHNHYTQKSLSLSLGK

SEQ ID NO: 291 - protein, 382 aa, Artificial Sequence
  source: /note="Description of Artificial Sequence: Synthetic polypeptide"
APTSSSTKKTQLQLEHLLLDLQMILNGINNYKNPKLTRMLTFKFYMPKKATELKHLQCLEEELKPLEEALNLAPSKNFHLRPRDLIRNINVIVLELKGSETTFMCEYADETATIVEFLNRWITFSQSIISTLTGGGGSGGGGSGGGGSGGGGSESKYGPPCPPCPAPEFLGGPSVFLFPPKPKDTLMISRTPEVTCVVVDVSQEDPEVQFNWYVDGVEVHNAKTKPREEQFNSTYRVVSVLQVLHVDWLNGKEYKCKVSNKGLPSSIEKTISKAKGQPREPQVYTLPPSQEEMTKNQVSLTCLVKGFYPSDIVVEWESNGQPENNYKTTPPVLDSDGSFFLYSRLTVDKSRWQEGNVFSCSVMHEALHNHYTQKSLSLSLGK

SEQ ID NO: 292 - protein, 382 aa, Artificial Sequence
  source: /note="Description of Artificial Sequence: Synthetic polypeptide"
APTSSSTKKTQLQLEHLLLDLQMILNGINNYKNPKLTRMLTFKFYMPKKATELKHLQCLEEELKPLEEALNLAPSKNFHLRPRDLISLINVIVLELKGSETTFMCEYADETATIVEFLNRWITFSQSIISTLTGGGGSGGGGSGGGGSGGGGSESKYGPPCPPCPAPEFLGGPSVFLFPPKPKDTLMISRTPEVTCVVVDVSQEDPEVQFNWYVDGVEVHNAKTKPREEQFNSTYRVVSVLQVLHVDWLNGKEYKCKVSNKGLPSSIEKTISKAKGQPREPQVYTLPPSQEEMTKNQVSLTCLVKGFYPSDIVVEWESNGQPENNYKTTPPVLDSDGSFFLYSRLTVDKSRWQEGNVFSCSVMHEALHNHYTQKSLSLSLGK

SEQ ID NO: 293 - protein, 382 aa, Artificial Sequence
  source: /note="Description of Artificial Sequence: Synthetic polypeptide"
APTSSSTKKTQLQLEHLLLDLQMILNGINNYKNPKLTRMLTFKFYMPKKATELKHLQCLEEELKPLEEALNLAPSKNFHLRPRDLISSINVIVLELKGSETTFMCEYADETATIVEFLNRWITFSQSIISTLTGGGGSGGGGSGGGGSGGGGSESKYGPPCPPCPAPEFLGGPSVFLFPPKPKDTLMISRTPEVTCVVVDVSQEDPEVQFNWYVDGVEVHNAKTKPREEQFNSTYRVVSVLQVLHVDWLNGKEYKCKVSNKGLPSSIEKTISKAKGQPREPQVYTLPPSQEEMTKNQVSLTCLVKGFYPSDIVVEWESNGQPENNYKTTPPVLDSDGSFFLYSRLTVDKSRWQEGNVFSCSVMHEALHNHYTQKSLSLSLGK

SEQ ID NO: 294 - protein, 382 aa, Artificial Sequence
  source: /note="Description of Artificial Sequence: Synthetic polypeptide"
APTSSSTKKTQLQLEHLLLDLQMILNGINNYKNPKLTRMLTFKFYMPKKATELKHLQCLEEELKPLEEALNLAPSKNFHLRPRDLISNINVSVLELKGSETTFMCEYADETATIVEFLNRWITFSQSIISTLTGGGGSGGGGSGGGGSGGGGSESKYGPPCPPCPAPEFLGGPSVFLFPPKPKDTLMISRTPEVTCVVVDVSQEDPEVQFNWYVDGVEVHNAKTKPREEQFNSTYRVVSVLQVLHVDWLNGKEYKCKVSNKGLPSSIEKTISKAKGQPREPQVYTLPPSQEEMTKNQVSLTCLVKGFYPSDIVVEWESNGQPENNYKTTPPVLDSDGSFFLYSRLTVDKSRWQEGNVFSCSVMHEALHNHYTQKSLSLSLGK

SEQ ID NO: 295 - protein, 382 aa, Artificial Sequence
  source: /note="Description of Artificial Sequence: Synthetic polypeptide"
APTSSSTKKTQLQLEHLLLDLQMILNGINNYKNPELTRMLTFKFYMPKKATELKHLQCLEEELKPLEEALNLAPSKNFHLRPRDLISNINVIVLELKGSETTFMCEYADETATIVEFLNRWITFSQSIISTLTGGGGSGGGGSGGGGSGGGGSESKYGPPCPPCPAPEFLGGPSVFLFPPKPKDTLMISRTPEVTCVVVDVSQEDPEVQFNWYVDGVEVHNAKTKPREEQFNSTYRVVSVLQVLHVDWLNGKEYKCKVSNKGLPSSIEKTISKAKGQPREPQVYTLPPSQEEMTKNQVSLTCLVKGFYPSDIVVEWESNGQPENNYKTTPPVLDSDGSFFLYSRLTVDKSRWQEGNVFSCSVMHEALHNHYTQKSLSLSLGK

SEQ ID NO: 296 - protein, 382 aa, Artificial Sequence
  source: /note="Description of Artificial Sequence: Synthetic polypeptide"
APTSSSTKKTQLQLENLLLDLQMILNGINNYKNPELTRMLTFKFYMPKKATELKHLQCLEEELKPLEEALNLAPSKNFHLRPRDLISNINVIVLELKGSETTFMCEYADETATIVEFLNRWITFSQSIISTLTGGGGSGGGGSGGGGSGGGGSESKYGPPCPPCPAPEFLGGPSVFLFPPKPKDTLMISRTPEVTCVVVDVSQEDPEVQFNWYVDGVEVHNAKTKPREEQFNSTYRVVSVLQVLHVDWLNGKEYKCKVSNKGLPSSIEKTISKAKGQPREPQVYTLPPSQEEMTKNQVSLTCLVKGFYPSDIVVEWESNGQPENNYKTTPPVLDSDGSFFLYSRLTVDKSRWQEGNVFSCSVMHEALHNHYTQKSLSLSLGK

SEQ ID NO: 297 - protein, 382 aa, Artificial Sequence
  source: /note="Description of Artificial Sequence: Synthetic polypeptide"
APTSSSTKKTQLQLELLLLDLQMILNGINNYKNPELTRMLTFKFYMPKKATELKHLQCLEEELKPLEEALNLAPSKNFHLRPRDLISNINVIVLELKGSETTFMCEYADETATIVEFLNRWITFSQSIISTLTGGGGSGGGGSGGGGSGGGGSESKYGPPCPPCPAPEFLGGPSVFLFPPKPKDTLMISRTPEVTCVVVDVSQEDPEVQFNWYVDGVEVHNAKTKPREEQFNSTYRVVSVLQVLHVDWLNGKEYKCKVSNKGLPSSIEKTISKAKGQPREPQVYTLPPSQEEMTKNQVSLTCLVKGFYPSDIVVEWESNGQPENNYKTTPPVLDSDGSFFLYSRLTVDKSRWQEGNVFSCSVMHEALHNHYTQKSLSLSLGK

SEQ ID NO: 298 - protein, 382 aa, Artificial Sequence
  source: /note="Description of Artificial Sequence: Synthetic polypeptide"
APTSSSTKKTQLQLEHLLLDLQMILNGINNYKNPELTRMLTFKFYMPKKATELKHLQCLEEELKPLEEALNLAPSKNFHLRPRVLISNINVIVLELKGSETTFMCEYADETATIVEFLNRWITFSQSIISTLTGGGGSGGGGSGGGGSGGGGSESKYGPPCPPCPAPEFLGGPSVFLFPPKPKDTLMISRTPEVTCVVVDVSQEDPEVQFNWYVDGVEVHNAKTKPREEQFNSTYRVVSVLQVLHVDWLNGKEYKCKVSNKGLPSSIEKTISKAKGQPREPQVYTLPPSQEEMTKNQVSLTCLVKGFYPSDIVVEWESNGQPENNYKTTPPVLDSDGSFFLYSRLTVDKSRWQEGNVFSCSVMHEALHNHYTQKSLSLSLGK

SEQ ID NO: 299 - protein, 382 aa, Artificial Sequence
  source: /note="Description of Artificial Sequence: Synthetic polypeptide"
APTSSSTKKTQLQLEHLLLDLQMILNGINNYKNPELTRMLTFKFYMPKKATELKHLQCLEEELKPLEEALNLAPSKNFHLRPRDLISNINVSVLELKGSETTFMCEYADETATIVEFLNRWITFSQSIISTLTGGGGSGGGGSGGGGSGGGGSESKYGPPCPPCPAPEFLGGPSVFLFPPKPKDTLMISRTPEVTCVVVDVSQEDPEVQFNWYVDGVEVHNAKTKPREEQFNSTYRVVSVLQVLHVDWLNGKEYKCKVSNKGLPSSIEKTISKAKGQPREPQVYTLPPSQEEMTKNQVSLTCLVKGFYPSDIVVEWESNGQPENNYKTTPPVLDSDGSFFLYSRLTVDKSRWQEGNVFSCSVMHEALHNHYTQKSLSLSLGK

SEQ ID NO: 300 - protein, 382 aa, Artificial Sequence
  source: /note="Description of Artificial Sequence: Synthetic polypeptide"
APTSSSTKKTQLQLEHLLLDLQMILNGINNYKNPKLTQMLTFKFYMPKKATELKHLQCLEEELKPLEEALNLAPSKNFHLRPRDLISNINVIVLELKGSETTFMCEYADETATIVEFLNRWITFSQSIISTLTGGGGSGGGGSGGGGSGGGGSESKYGPPCPPCPAPEFLGGPSVFLFPPKPKDTLMISRTPEVTCVVVDVSQEDPEVQFNWYVDGVEVHNAKTKPREEQFNSTYRVVSVLQVLHVDWLNGKEYKCKVSNKGLPSSIEKTISKAKGQPREPQVYTLPPSQEEMTKNQVSLTCLVKGFYPSDIVVEWESNGQPENNYKTTPPVLDSDGSFFLYSRLTVDKSRWQEGNVFSCSVMHEALHNHYTQKSLSLSLGK

SEQ ID NO: 301 - protein, 382 aa, Artificial Sequence
  source: /note="Description of Artificial Sequence: Synthetic polypeptide"
APTSSSTKKTQLQLENLLLDLQMILNGINNYKNPKLTQMLTFKFYMPKKATELKHLQCLEEELKPLEEALNLAPSKNFHLRPRDLISNINVIVLELKGSETTFMCEYADETATIVEFLNRWITFSQSIISTLTGGGGSGGGGSGGGGSGGGGSESKYGPPCPPCPAPEFLGGPSVFLFPPKPKDTLMISRTPEVTCVVVDVSQEDPEVQFNWYVDGVEVHNAKTKPREEQFNSTYRVVSVLQVLHVDWLNGKEYKCKVSNKGLPSSIEKTISKAKGQPREPQVYTLPPSQEEMTKNQVSLTCLVKGFYPSDIVVEWESNGQPENNYKTTPPVLDSDGSFFLYSRLTVDKSRWQEGNVFSCSVMHEALHNHYTQKSLSLSLGK

SEQ ID NO: 302 - protein, 382 aa, Artificial Sequence
  source: /note="Description of Artificial Sequence: Synthetic polypeptide"
APTSSSTKKTQLQLELLLLDLQMILNGINNYKNPKLTQMLTFKFYMPKKATELKHLQCLEEELKPLEEALNLAPSKNFHLRPRDLISNINVIVLELKGSETTFMCEYADETATIVEFLNRWITFSQSIISTLTGGGGSGGGGSGGGGSGGGGSESKYGPPCPPCPAPEFLGGPSVFLFPPKPKDTLMISRTPEVTCVVVDVSQEDPEVQFNWYVDGVEVHNAKTKPREEQFNSTYRVVSVLQVLHVDWLNGKEYKCKVSNKGLPSSIEKTISKAKGQPREPQVYTLPPSQEEMTKNQVSLTCLVKGFYPSDIVVEWESNGQPENNYKTTPPVLDSDGSFFLYSRLTVDKSRWQEGNVFSCSVMHEALHNHYTQKSLSLSLGK

SEQ ID NO: 303 - protein, 382 aa, Artificial Sequence
  source: /note="Description of Artificial Sequence: Synthetic polypeptide"
APTSSSTKKTQLQLEHLLLDLQMILNGINNYKNPKLTQMLTFKFYMPKKATELKHLQCLEEELKPLEEALNLAPSKNFHLRPRVLISNINVIVLELKGSETTFMCEYADETATIVEFLNRWITFSQSIISTLTGGGGSGGGGSGGGGSGGGGSESKYGPPCPPCPAPEFLGGPSVFLFPPKPKDTLMISRTPEVTCVVVDVSQEDPEVQFNWYVDGVEVHNAKTKPREEQFNSTYRVVSVLQVLHVDWLNGKEYKCKVSNKGLPSSIEKTISKAKGQPREPQVYTLPPSQEEMTKNQVSLTCLVKGFYPSDIVVEWESNGQPENNYKTTPPVLDSDGSFFLYSRLTVDKSRWQEGNVFSCSVMHEALHNHYTQKSLSLSLGK

SEQ ID NO: 304 - protein, 382 aa, Artificial Sequence
  source: /note="Description of Artificial Sequence: Synthetic polypeptide"
APTSSSTKKTQLQLEHLLLDLQMILNGINNYKNPKLTQMLTFKFYMPKKATELKHLQCLEEELKPLEEALNLAPSKNFHLRPRDLISNINVSVLELKGSETTFMCEYADETATIVEFLNRWITFSQSIISTLTGGGGSGGGGSGGGGSGGGGSESKYGPPCPPCPAPEFLGGPSVFLFPPKPKDTLMISRTPEVTCVVVDVSQEDPEVQFNWYVDGVEVHNAKTKPREEQFNSTYRVVSVLQVLHVDWLNGKEYKCKVSNKGLPSSIEKTISKAKGQPREPQVYTLPPSQEEMTKNQVSLTCLVKGFYPSDIVVEWESNGQPENNYKTTPPVLDSDGSFFLYSRLTVDKSRWQEGNVFSCSVMHEALHNHYTQKSLSLSLGK

SEQ ID NO: 305 - protein, 382 aa, Artificial Sequence
  source: /note="Description of Artificial Sequence: Synthetic polypeptide"
APTSSSTKKTQLQLEHLLLDLQMILNGINNYKNPKLTNMLTFKFYMPKKATELKHLQCLEEELKPLEEALNLAPSKNFHLRPRDLISNINVIVLELKGSETTFMCEYADETATIVEFLNRWITFSQSIISTLTGGGGSGGGGSGGGGSGGGGSESKYGPPCPPCPAPEFLGGPSVFLFPPKPKDTLMISRTPEVTCVVVDVSQEDPEVQFNWYVDGVEVHNAKTKPREEQFNSTYRVVSVLQVLHVDWLNGKEYKCKVSNKGLPSSIEKTISKAKGQPREPQVYTLPPSQEEMTKNQVSLTCLVKGFYPSDIVVEWESNGQPENNYKTTPPVLDSDGSFFLYSRLTVDKSRWQEGNVFSCSVMHEALHNHYTQKSLSLSLGK

SEQ ID NO: 306 - protein, 382 aa, Artificial Sequence
  source: /note="Description of Artificial Sequence: Synthetic polypeptide"
APTSSSTKKTQLQLENLLLDLQMILNGINNYKNPKLTNMLTFKFYMPKKATELKHLQCLEEELKPLEEALNLAPSKNFHLRPRDLISNINVIVLELKGSETTFMCEYADETATIVEFLNRWITFSQSIISTLTGGGGSGGGGSGGGGSGGGGSESKYGPPCPPCPAPEFLGGPSVFLFPPKPKDTLMISRTPEVTCVVVDVSQEDPEVQFNWYVDGVEVHNAKTKPREEQFNSTYRVVSVLQVLHVDWLNGKEYKCKVSNKGLPSSIEKTISKAKGQPREPQVYTLPPSQEEMTKNQVSLTCLVKGFYPSDIVVEWESNGQPENNYKTTPPVLDSDGSFFLYSRLTVDKSRWQEGNVFSCSVMHEALHNHYTQKSLSLSLGK

SEQ ID NO: 307 - protein, 382 aa, Artificial Sequence
  source: /note="Description of Artificial Sequence: Synthetic polypeptide"
APTSSSTKKTQLQLELLLLDLQMILNGINNYKNPKLTNMLTFKFYMPKKATELKHLQCLEEELKPLEEALNLAPSKNFHLRPRDLISNINVIVLELKGSETTFMCEYADETATIVEFLNRWITFSQSIISTLTGGGGSGGGGSGGGGSGGGGSESKYGPPCPPCPAPEFLGGPSVFLFPPKPKDTLMISRTPEVTCVVVDVSQEDPEVQFNWYVDGVEVHNAKTKPREEQFNSTYRVVSVLQVLHVDWLNGKEYKCKVSNKGLPSSIEKTISKAKGQPREPQVYTLPPSQEEMTKNQVSLTCLVKGFYPSDIVVEWESNGQPENNYKTTPPVLDSDGSFFLYSRLTVDKSRWQEGNVFSCSVMHEALHNHYTQKSLSLSLGK

SEQ ID NO: 308 - protein, 382 aa, Artificial Sequence
  source: /note="Description of Artificial Sequence: Synthetic polypeptide"
APTSSSTKKTQLQLEHLLLDLQMILNGINNYKNPKLTNMLTFKFYMPKKATELKHLQCLEEELKPLEEALNLAPSKNFHLRPRVLISNINVIVLELKGSETTFMCEYADETATIVEFLNRWITFSQSIISTLTGGGGSGGGGSGGGGSGGGGSESKYGPPCPPCPAPEFLGGPSVFLFPPKPKDTLMISRTPEVTCVVVDVSQEDPEVQFNWYVDGVEVHNAKTKPREEQFNSTYRVVSVLQVLHVDWLNGKEYKCKVSNKGLPSSIEKTISKAKGQPREPQVYTLPPSQEEMTKNQVSLTCLVKGFYPSDIVVEWESNGQPENNYKTTPPVLDSDGSFFLYSRLTVDKSRWQEGNVFSCSVMHEALHNHYTQKSLSLSLGK

SEQ ID NO: 309 - protein, 382 aa, Artificial Sequence
  source: /note="Description of Artificial Sequence: Synthetic polypeptide"
APTSSSTKKTQLQLEHLLLDLQMILNGINNYKNPKLTNMLTFKFYMPKKATELKHLQCLEEELKPLEEALNLAPSKNFHLRPRDLISNINVSVLELKGSETTFMCEYADETATIVEFLNRWITFSQSIISTLTGGGGSGGGGSGGGGSGGGGSESKYGPPCPPCPAPEFLGGPSVFLFPPKPKDTLMISRTPEVTCVVVDVSQEDPEVQFNWYVDGVEVHNAKTKPREEQFNSTYRVVSVLQVLHVDWLNGKEYKCKVSNKGLPSSIEKTISKAKGQPREPQVYTLPPSQEEMTKNQVSLTCLVKGFYPSDIVVEWESNGQPENNYKTTPPVLDSDGSFFLYSRLTVDKSRWQEGNVFSCSVMHEALHNHYTQKSLSLSLGK

SEQ ID NO: 310 - protein, 382 aa, Artificial Sequence
  source: /note="Description of Artificial Sequence: Synthetic polypeptide"
APTSSSTKKTQLQLEHLLLDLQMILNGINNYKNPKLTEMLTFKFYMPKKATELKHLQCLEEELKPLEEALNLAPSKNFHLRPRDLISNINVIVLELKGSETTFMCEYADETATIVEFLNRWITFSQSIISTLTGGGGSGGGGSGGGGSGGGGSESKYGPPCPPCPAPEFLGGPSVFLFPPKPKDTLMISRTPEVTCVVVDVSQEDPEVQFNWYVDGVEVHNAKTKPREEQFNSTYRVVSVLQVLHVDWLNGKEYKCKVSNKGLPSSIEKTISKAKGQPREPQVYTLPPSQEEMTKNQVSLTCLVKGFYPSDIVVEWESNGQPENNYKTTPPVLDSDGSFFLYSRLTVDKSRWQEGNVFSCSVMHEALHNHYTQKSLSLSLGK

SEQ ID NO: 311 - protein, 382 aa, Artificial Sequence
  source: /note="Description of Artificial Sequence: Synthetic polypeptide"
APTSSSTKKTQLQLEHLLLDLQMILNGINNYKNPKLTRMLTKKFYMPKKATELKHLQCLEEELKPLEEALNLAPSKNFHLRPRDLISNINVIVLELKGSETTFMCEYADETATIVEFLNRWITFSQSIISTLTGGGGSGGGGSGGGGSGGGGSESKYGPPCPPCPAPEFLGGPSVFLFPPKPKDTLMISRTPEVTCVVVDVSQEDPEVQFNWYVDGVEVHNAKTKPREEQFNSTYRVVSVLQVLHVDWLNGKEYKCKVSNKGLPSSIEKTISKAKGQPREPQVYTLPPSQEEMTKNQVSLTCLVKGFYPSDIVVEWESNGQPENNYKTTPPVLDSDGSFFLYSRLTVDKSRWQEGNVFSCSVMHEALHNHYTQKSLSLSLGK

SEQ ID NO: 312 - protein, 382 aa, Artificial Sequence
  source: /note="Description of Artificial Sequence: Synthetic polypeptide"
APTSSSTKKTQLQLEHLLLDLQMILNGINNYKNPKLTRMLTQKFYMPKKATELKHLQCLEEELKPLEEALNLAPSKNFHLRPRDLISNINVIVLELKGSETTFMCEYADETATIVEFLNRWITFSQSIISTLTGGGGSGGGGSGGGGSGGGGSESKYGPPCPPCPAPEFLGGPSVFLFPPKPKDTLMISRTPEVTCVVVDVSQEDPEVQFNWYVDGVEVHNAKTKPREEQFNSTYRVVSVLQVLHVDWLNGKEYKCKVSNKGLPSSIEKTISKAKGQPREPQVYTLPPSQEEMTKNQVSLTCLVKGFYPSDIVVEWESNGQPENNYKTTPPVLDSDGSFFLYSRLTVDKSRWQEGNVFSCSVMHEALHNHYTQKSLSLSLGK

SEQ ID NO: 313 - protein, 382 aa, Artificial Sequence
  source: /note="Description of Artificial Sequence: Synthetic polypeptide"
APTSSSTKKTQLQLEHLLLDLQMILNGINNYKNPKLTRMLTAKFAMPKKATELKHLQCLEEELKPLEEALNGAPSKNFHLRPRDLISDINVIVLELKGSETTFMCEYADETATIVEFLNRWITFSQSIISTLTGGGGSGGGGSGGGGSGGGGSESKYGPPCPPCPAPEFLGGPSVFLFPPKPKDTLMISRTPEVTCVVVDVSQEDPEVQFNWYVDGVEVHNAKTKPREEQFNSTYRVVSVLQVLHVDWLNGKEYKCKVSNKGLPSSIEKTISKAKGQPREPQVYTLPPSQEEMTKNQVSLTCLVKGFYPSDIVVEWESNGQPENNYKTTPPVLDSDGSFFLYSRLTVDKSRWQEGNVFSCSVMHEALHNHYTQKSLSLSLGK

SEQ ID NO: 314 - protein, 382 aa, Artificial Sequence
  source: /note="Description of Artificial Sequence: Synthetic polypeptide"
APTSSSTKKTQLQLEHLLLDLQMILNGINNYKNPKLTNMLTFKFYMPKKATELKHLQCLEEELKPLEEALNLAPSKNFHLRPRDLIRNINVIVLELKGSETTFMCEYADETATIVEFLNRWITFSQSIISTLTGGGGSGGGGSGGGGSGGGGSESKYGPPCPPCPAPEFLGGPSVFLFPPKPKDTLMISRTPEVTCVVVDVSQEDPEVQFNWYVDGVEVHNAKTKPREEQFNSTYRVVSVLQVLHVDWLNGKEYKCKVSNKGLPSSIEKTISKAKGQPREPQVYTLPPSQEEMTKNQVSLTCLVKGFYPSDIVVEWESNGQPENNYKTTPPVLDSDGSFFLYSRLTVDKSRWQEGNVFSCSVMHEALHNHYTQKSLSLSLGK

SEQ ID NO: 315 - protein, 382 aa, Artificial Sequence
  source: /note="Description of Artificial Sequence: Synthetic polypeptide"
APTSSSTKKTQLQLENLLLDLQMILNGINNYKNPKLTEMLTFKFYMPKKATELKHLQCLEEELKPLEEALNLAPSKNFHLRPRDLISNINVIVLELKGSETTFMCEYADETATIVEFLNRWITFSQSIISTLTGGGGSGGGGSGGGGSGGGGSESKYGPPCPPCPAPEFLGGPSVFLFPPKPKDTLMISRTPEVTCVVVDVSQEDPEVQFNWYVDGVEVHNAKTKPREEQFNSTYRVVSVLQVLHVDWLNGKEYKCKVSNKGLPSSIEKTISKAKGQPREPQVYTLPPSQEEMTKNQVSLTCLVKGFYPSDIVVEWESNGQPENNYKTTPPVLDSDGSFFLYSRLTVDKSRWQEGNVFSCSVMHEALHNHYTQKSLSLSLGK

SEQ ID NO: 316 - protein, 382 aa, Artificial Sequence
  source: /note="Description of Artificial Sequence: Synthetic polypeptide"
APTSSSTKKTQLQLEHLLLDLQMILNGINNYKNPKLTEMLTFKFYMPKKATELKHLQCLEEELKPLEEALNLAPSKNFHLRPRVLISNINVIVLELKGSETTFMCEYADETATIVEFLNRWITFSQSIISTLTGGGGSGGGGSGGGGSGGGGSESKYGPPCPPCPAPEFLGGPSVFLFPPKPKDTLMISRTPEVTCVVVDVSQEDPEVQFNWYVDGVEVHNAKTKPREEQFNSTYRVVSVLQVLHVDWLNGKEYKCKVSNKGLPSSIEKTISKAKGQPREPQVYTLPPSQEEMTKNQVSLTCLVKGFYPSDIVVEWESNGQPENNYKTTPPVLDSDGSFFLYSRLTVDKSRWQEGNVFSCSVMHEALHNHYTQKSLSLSLGK

SEQ ID NO: 317 - protein, 382 aa, Artificial Sequence
  source: /note="Description of Artificial Sequence: Synthetic polypeptide"
APTSSSTKKTQLQLEHLLLDLQMILNGINNYKNPKLTEMLTFKFYMPKKATELKHLQCLEEELKPLEEALNLAPSKNFHLRPRDLIRNINVIVLELKGSETTFMCEYADETATIVEFLNRWITFSQSIISTLTGGGGSGGGGSGGGGSGGGGSESKYGPPCPPCPAPEFLGGPSVFLFPPKPKDTLMISRTPEVTCVVVDVSQEDPEVQFNWYVDGVEVHNAKTKPREEQFNSTYRVVSVLQVLHVDWLNGKEYKCKVSNKGLPSSIEKTISKAKGQPREPQVYTLPPSQEEMTKNQVSLTCLVKGFYPSDIVVEWESNGQPENNYKTTPPVLDSDGSFFLYSRLTVDKSRWQEGNVFSCSVMHEALHNHYTQKSLSLSLGK

SEQ ID NO: 318 - protein, 382 aa, Artificial Sequence
  source: /note="Description of Artificial Sequence: Synthetic polypeptide"
APTSSSTKKTQLQLEHLLLDLQMILNGINNYKNPKLTEMLTFKFYMPKKATELKHLQCLEEELKPLEEALNLAPSKNFHLRPRDLISNINVSVLELKGSETTFMCEYADETATIVEFLNRWITFSQSIISTLTGGGGSGGGGSGGGGSGGGGSESKYGPPCPPCPAPEFLGGPSVFLFPPKPKDTLMISRTPEVTCVVVDVSQEDPEVQFNWYVDGVEVHNAKTKPREEQFNSTYRVVSVLQVLHVDWLNGKEYKCKVSNKGLPSSIEKTISKAKGQPREPQVYTLPPSQEEMTKNQVSLTCLVKGFYPSDIVVEWESNGQPENNYKTTPPVLDSDGSFFLYSRLTVDKSRWQEGNVFSCSVMHEALHNHYTQKSLSLSLGK

SEQ ID NO: 319 - protein, 382 aa, Artificial Sequence
  source: /note="Description of Artificial Sequence: Synthetic polypeptide"
APTSSSTKKTQLQLENLLLDLQMILNGINNYKNPKLTRMLTQKFYMPKKATELKHLQCLEEELKPLEEALNLAPSKNFHLRPRDLISNINVIVLELKGSETTFMCEYADETATIVEFLNRWITFSQSIISTLTGGGGSGGGGSGGGGSGGGGSESKYGPPCPPCPAPEFLGGPSVFLFPPKPKDTLMISRTPEVTCVVVDVSQEDPEVQFNWYVDGVEVHNAKTKPREEQFNSTYRVVSVLQVLHVDWLNGKEYKCKVSNKGLPSSIEKTISKAKGQPREPQVYTLPPSQEEMTKNQVSLTCLVKGFYPSDIVVEWESNGQPENNYKTTPPVLDSDGSFFLYSRLTVDKSRWQEGNVFSCSVMHEALHNHYTQKSLSLSLGK

SEQ ID NO: 320 - protein, 382 aa, Artificial Sequence
  source: /note="Description of Artificial Sequence: Synthetic polypeptide"
APTSSSTKKTQLQLEHLLLDLQMILNGINNYKNPKLTRMLTQKFYMPKKATELKHLQCLEEELKPLEEALNLAPSKNFHLRPRDLISNINVSVLELKGSETTFMCEYADETATIVEFLNRWITFSQSIISTLTGGGGSGGGGSGGGGSGGGGSESKYGPPCPPCPAPEFLGGPSVFLFPPKPKDTLMISRTPEVTCVVVDVSQEDPEVQFNWYVDGVEVHNAKTKPREEQFNSTYRVVSVLQVLHVDWLNGKEYKCKVSNKGLPSSIEKTISKAKGQPREPQVYTLPPSQEEMTKNQVSLTCLVKGFYPSDIVVEWESNGQPENNYKTTPPVLDSDGSFFLYSRLTVDKSRWQEGNVFSCSVMHEALHNHYTQKSLSLSLGK

SEQ ID NO: 321 - protein, 382 aa, Artificial Sequence
  source: /note="Description of Artificial Sequence: Synthetic polypeptide"
APTSSSTKKTQLQLENLLLDLQMILNGINNYKNPELTNMLTFKFYMPKKATELKHLQCLEEELKPLEEALNLAPSKNFHLRPRDLISNINVIVLELKGSETTFMCEYADETATIVEFLNRWITFSQSIISTLTGGGGSGGGGSGGGGSGGGGSESKYGPPCPPCPAPEFLGGPSVFLFPPKPKDTLMISRTPEVTCVVVDVSQEDPEVQFNWYVDGVEVHNAKTKPREEQFNSTYRVVSVLQVLHVDWLNGKEYKCKVSNKGLPSSIEKTISKAKGQPREPQVYTLPPSQEEMTKNQVSLTCLVKGFYPSDIVVEWESNGQPENNYKTTPPVLDSDGSFFLYSRLTVDKSRWQEGNVFSCSVMHEALHNHYTQKSLSLSLGK

SEQ ID NO: 322 - protein, 382 aa, Artificial Sequence
  source: /note="Description of Artificial Sequence: Synthetic polypeptide"
APTSSSTKKTQLQLEHLLLDLQMILNGINNYKNPKLTRMLTFKFYMPKKATELKHLQCLEEELKPLEEVLNLAQSKNFHLRPRDLISNINVIVLELKGSETTFMCEYADETATIVEFLNRWITFSQSIISTLTGGGGSGGGGSGGGGSGGGGSESKYGPPCPPCPAPEFLGGPSVFLFPPKPKDTLMISRTPEVTCVVVDVSQEDPEVQFNWYVDGVEVHNAKTKPREEQFNSTYRVVSVLQVLHVDWLNGKEYKCKVSNKGLPSSIEKTISKAKGQPREPQVYTLPPSQEEMTKNQVSLTCLVKGFYPSDIVVEWESNGQPENNYKTTPPVLDSDGSFFLYSKLTVDKSRWQEGNVFSCSVMHEALHNHYTQKSLSLSLGK

SEQ ID NO: 323 - protein, 382 aa, Artificial Sequence
  source: /note="Description of Artificial Sequence: Synthetic polypeptide"
APTSSSTKKTQLQLEHLLLDLQMILNGINNYKNPKLTRMLTFKFYMPKKATELKHLQCLEEELKPLEEALNLAPSKNFHLRPRDLISNINVIVLELKGSETTFMCEYADETATIVEFLNRWITFSQSIISTLTGGGGSGGGGSGGGGSGGGGSESKYGPPCPPCPAPEFLGGPSVFLFPPKPKDTLMISRTPEVTCVVVDVSQEDPEVQFNWYVDGVEVHNAKTKPREEQFNSTYRVVSVLQVLHVDWLNGKEYKCKVSNKGLPSSIEKTISKAKGQPREPQVYTLPPSQEEMTKNQVSLTCLVKGFYPSDIVVEWESNGQPENNYKTTPPVLDSDGSFFLYSKLTVDKSRWQEGNVFSCSVMHEALHNHYTQKSLSLSLGK

SEQ ID NO: 324 - protein, 382 aa, Artificial Sequence
  source: /note="Description of Artificial Sequence: Synthetic polypeptide"
APTSSSTKKTQLQLEDLLLDLQMILNGINNYKNPKLTRMLTFKFYMPKKATELKHLQCLEEELKPLEEALNLAPSKNFHLRPRDLISNINVIVLELKGSETTFMCEYADETATIVEFLNRWITFSQSIISTLTGGGGSGGGGSGGGGSGGGGSESKYGPPCPPCPAPEFLGGPSVFLFPPKPKDTLMISRTPEVTCVVVDVSQEDPEVQFNWYVDGVEVHNAKTKPREEQFNSTYRVVSVLQVLHVDWLNGKEYKCKVSNKGLPSSIEKTISKAKGQPREPQVYTLPPSQEEMTKNQVSLTCLVKGFYPSDIVVEWESNGQPENNYKTTPPVLDSDGSFFLYSKLTVDKSRWQEGNVFSCSVMHEALHNHYTQKSLSLSLGK

SEQ ID NO: 325 - protein, 382 aa, Artificial Sequence
  source: /note="Description of Artificial Sequence: Synthetic polypeptide"
APTSSSTKKTQLQLENLLLDLQMILNGINNYKNPKLTRMLTFKFYMPKKATELKHLQCLEEELKPLEEALNLAPSKNFHLRPRDLISNINVIVLELKGSETTFMCEYADETATIVEFLNRWITFSQSIISTLTGGGGSGGGGSGGGGSGGGGSESKYGPPCPPCPAPEFLGGPSVFLFPPKPKDTLMISRTPEVTCVVVDVSQEDPEVQFNWYVDGVEVHNAKTKPREEQFNSTYRVVSVLQVLHVDWLNGKEYKCKVSNKGLPSSIEKTISKAKGQPREPQVYTLPPSQEEMTKNQVSLTCLVKGFYPSDIVVEWESNGQPENNYKTTPPVLDSDGSFFLYSKLTVDKSRWQEGNVFSCSVMHEALHNHYTQKSLSLSLGK

SEQ ID NO: 326 - protein, 382 aa, Artificial Sequence
  source: /note="Description of Artificial Sequence: Synthetic polypeptide"
APTSSSTKKTQLQLELLLLDLQMILNGINNYKNPKLTRMLTFKFYMPKKATELKHLQCLEEELKPLEEALNLAPSKNFHLRPRDLISNINVIVLELKGSETTFMCEYADETATIVEFLNRWITFSQSIISTLTGGGGSGGGGSGGGGSGGGGSESKYGPPCPPCPAPEFLGGPSVFLFPPKPKDTLMISRTPEVTCVVVDVSQEDPEVQFNWYVDGVEVHNAKTKPREEQFNSTYRVVSVLQVLHVDWLNGKEYKCKVSNKGLPSSIEKTISKAKGQPREPQVYTLPPSQEEMTKNQVSLTCLVKGFYPSDIVVEWESNGQPENNYKTTPPVLDSDGSFFLYSKLTVDKSRWQEGNVFSCSVMHEALHNHYTQKSLSLSLGK

SEQ ID NO: 327 - protein, 382 aa, Artificial Sequence
  source: /note="Description of Artificial Sequence: Synthetic polypeptide"
APTSSSTKKTQLQLEHLLLDLQMILNGTNNYKNPKLTRMLTFKFYMPKKATELKHLQCLEEELKPLEEALNLAPSKNFHLRPRDLISNINVIVLELKGSETTFMCEYADETATIVEFLNRWITFSQSIISTLTGGGGSGGGGSGGGGSGGGGSESKYGPPCPPCPAPEFLGGPSVFLFPPKPKDTLMISRTPEVTCVVVDVSQEDPEVQFNWYVDGVEVHNAKTKPREEQFNSTYRVVSVLQVLHVDWLNGKEYKCKVSNKGLPSSIEKTISKAKGQPREPQVYTLPPSQEEMTKNQVSLTCLVKGFYPSDIVVEWESNGQPENNYKTTPPVLDSDGSFFLYSKLTVDKSRWQEGNVFSCSVMHEALHNHYTQKSLSLSLGK

SEQ ID NO: 328 - protein, 382 aa, Artificial Sequence
  source: /note="Description of Artificial Sequence: Synthetic polypeptide"
APTSSSTKKTQLQLEHLLLDLQMILNGINNYKNPKLTRMLTFKFYMPKKATELKHLQCLEEELKPLEEALNLAPSKNFHLRPRVLISNINVIVLELKGSETTFMCEYADETATIVEFLNRWITFSQSIISTLTGGGGSGGGGSGGGGSGGGGSESKYGPPCPPCPAPEFLGGPSVFLFPPKPKDTLMISRTPEVTCVVVDVSQEDPEVQFNWYVDGVEVHNAKTKPREEQFNSTYRVVSVLQVLHVDWLNGKEYKCKVSNKGLPSSIEKTISKAKGQPREPQVYTLPPSQEEMTKNQVSLTCLVKGFYPSDIVVEWESNGQPENNYKTTPPVLDSDGSFFLYSKLTVDKSRWQEGNVFSCSVMHEALHNHYTQKSLSLSLGK

SEQ ID NO: 329 - protein, 382 aa, Artificial Sequence
  source: /note="Description of Artificial Sequence: Synthetic polypeptide"
APTSSSTKKTQLQLEHLLLDLQMILNGINNYKNPKLTRMLTFKFYMPKKATELKHLQCLEEELKPLEEALNLAPSKNFHLRPRDLIRNINVIVLELKGSETTFMCEYADETATIVEFLNRWITFSQSIISTLTGGGGSGGGGSGGGGSGGGGSESKYGPPCPPCPAPEFLGGPSVFLFPPKPKDTLMISRTPEVTCVVVDVSQEDPEVQFNWYVDGVEVHNAKTKPREEQFNSTYRVVSVLQVLHVDWLNGKEYKCKVSNKGLPSSIEKTISKAKGQPREPQVYTLPPSQEEMTKNQVSLTCLVKGFYPSDIVVEWESNGQPENNYKTTPPVLDSDGSFFLYSKLTVDKSRWQEGNVFSCSVMHEALHNHYTQKSLSLSLGK

SEQ ID NO: 330 - protein, 382 aa, Artificial Sequence
  source: /note="Description of Artificial Sequence: Synthetic polypeptide"
APTSSSTKKTQLQLEHLLLDLQMILNGINNYKNPKLTRMLTFKFYMPKKATELKHLQCLEEELKPLEEALNLAPSKNFHLRPRDLISLINVIVLELKGSETTFMCEYADETATIVEFLNRWITFSQSIISTLTGGGGSGGGGSGGGGSGGGGSESKYGPPCPPCPAPEFLGGPSVFLFPPKPKDTLMISRTPEVTCVVVDVSQEDPEVQFNWYVDGVEVHNAKTKPREEQFNSTYRVVSVLQVLHVDWLNGKEYKCKVSNKGLPSSIEKTISKAKGQPREPQVYTLPPSQEEMTKNQVSLTCLVKGFYPSDIVVEWESNGQPENNYKTTPPVLDSDGSFFLYSKLTVDKSRWQEGNVFSCSVMHEALHNHYTQKSLSLSLGK

SEQ ID NO: 331 - protein, 382 aa, Artificial Sequence
  source: /note="Description of Artificial Sequence: Synthetic polypeptide"
APTSSSTKKTQLQLEHLLLDLQMILNGINNYKNPKLTRMLTFKFYMPKKATELKHLQCLEEELKPLEEALNLAPSKNFHLRPRDLISSINVIVLELKGSETTFMCEYADETATIVEFLNRWITFSQSIISTLTGGGGSGGGGSGGGGSGGGGSESKYGPPCPPCPAPEFLGGPSVFLFPPKPKDTLMISRTPEVTCVVVDVSQEDPEVQFNWYVDGVEVHNAKTKPREEQFNSTYRVVSVLQVLHVDWLNGKEYKCKVSNKGLPSSIEKTISKAKGQPREPQVYTLPPSQEEMTKNQVSLTCLVKGFYPSDIVVEWESNGQPENNYKTTPPVLDSDGSFFLYSKLTVDKSRWQEGNVFSCSVMHEALHNHYTQKSLSLSLGK

SEQ ID NO: 332 - protein, 382 aa, Artificial Sequence
  source: /note="Description of Artificial Sequence: Synthetic polypeptide"
APTSSSTKKTQLQLEHLLLDLQMILNGINNYKNPKLTRMLTFKFYMPKKATELKHLQCLEEELKPLEEALNLAPSKNFHLRPRDLISNINVSVLELKGSETTFMCEYADETATIVEFLNRWITFSQSIISTLTGGGGSGGGGSGGGGSGGGGSESKYGPPCPPCPAPEFLGGPSVFLFPPKPKDTLMISRTPEVTCVVVDVSQEDPEVQFNWYVDGVEVHNAKTKPREEQFNSTYRVVSVLQVLHVDWLNGKEYKCKVSNKGLPSSIEKTISKAKGQPREPQVYTLPPSQEEMTKNQVSLTCLVKGFYPSDIVVEWESNGQPENNYKTTPPVLDSDGSFFLYSKLTVDKSRWQEGNVFSCSVMHEALHNHYTQKSLSLSLGK

SEQ ID NO: 333 - protein, 382 aa, Artificial Sequence
  source: /note="Description of Artificial Sequence: Synthetic polypeptide"
APTSSSTKKTQLQLEHLLLDLQMILNGINNYKNPELTRMLTFKFYMPKKATELKHLQCLEEELKPLEEALNLAPSKNFHLRPRDLISNINVIVLELKGSETTFMCEYADETATIVEFLNRWITFSQSIISTLTGGGGSGGGGSGGGGSGGGGSESKYGPPCPPCPAPEFLGGPSVFLFPPKPKDTLMISRTPEVTCVVVDVSQEDPEVQFNWYVDGVEVHNAKTKPREEQFNSTYRVVSVLQVLHVDWLNGKEYKCKVSNKGLPSSIEKTISKAKGQPREPQVYTLPPSQEEMTKNQVSLTCLVKGFYPSDIVVEWESNGQPENNYKTTPPVLDSDGSFFLYSKLTVDKSRWQEGNVFSCSVMHEALHNHYTQKSLSLSLGK

SEQ ID NO: 334 - protein, 382 aa, Artificial Sequence
  source: /note="Description of Artificial Sequence: Synthetic polypeptide"
APTSSSTKKTQLQLENLLLDLQMILNGINNYKNPELTRMLTFKFYMPKKATELKHLQCLEEELKPLEEALNLAPSKNFHLRPRDLISNINVIVLELKGSETTFMCEYADETATIVEFLNRWITFSQSIISTLTGGGGSGGGGSGGGGSGGGGSESKYGPPCPPCPAPEFLGGPSVFLFPPKPKDTLMISRTPEVTCVVVDVSQEDPEVQFNWYVDGVEVHNAKTKPREEQFNSTYRVVSVLQVLHVDWLNGKEYKCKVSNKGLPSSIEKTISKAKGQPREPQVYTLPPSQEEMTKNQVSLTCLVKGFYPSDIVVEWESNGQPENNYKTTPPVLDSDGSFFLYSKLTVDKSRWQEGNVFSCSVMHEALHNHYTQKSLSLSLGK

SEQ ID NO: 335 - protein, 382 aa, Artificial Sequence
  source: /note="Description of Artificial Sequence: Synthetic polypeptide"
APTSSSTKKTQLQLELLLLDLQMILNGINNYKNPELTRMLTFKFYMPKKATELKHLQCLEEELKPLEEALNLAPSKNFHLRPRDLISNINVIVLELKGSETTFMCEYADETATIVEFLNRWITFSQSIISTLTGGGGSGGGGSGGGGSGGGGSESKYGPPCPPCPAPEFLGGPSVFLFPPKPKDTLMISRTPEVTCVVVDVSQEDPEVQFNWYVDGVEVHNAKTKPREEQFNSTYRVVSVLQVLHVDWLNGKEYKCKVSNKGLPSSIEKTISKAKGQPREPQVYTLPPSQEEMTKNQVSLTCLVKGFYPSDIVVEWESNGQPENNYKTTPPVLDSDGSFFLYSKLTVDKSRWQEGNVFSCSVMHEALHNHYTQKSLSLSLGK

SEQ ID NO: 336 - protein, 382 aa, Artificial Sequence
  source: /note="Description of Artificial Sequence: Synthetic polypeptide"
APTSSSTKKTQLQLEHLLLDLQMILNGINNYKNPELTRMLTFKFYMPKKATELKHLQCLEEELKPLEEALNLAPSKNFHLRPRVLISNINVIVLELKGSETTFMCEYADETATIVEFLNRWITFSQSIISTLTGGGGSGGGGSGGGGSGGGGSESKYGPPCPPCPAPEFLGGPSVFLFPPKPKDTLMISRTPEVTCVVVDVSQEDPEVQFNWYVDGVEVHNAKTKPREEQFNSTYRVVSVLQVLHVDWLNGKEYKCKVSNKGLPSSIEKTISKAKGQPREPQVYTLPPSQEEMTKNQVSLTCLVKGFYPSDIVVEWESNGQPENNYKTTPPVLDSDGSFFLYSKLTVDKSRWQEGNVFSCSVMHEALHNHYTQKSLSLSLGK

SEQ ID NO: 337 - protein, 382 aa, Artificial Sequence
  source: /note="Description of Artificial Sequence: Synthetic polypeptide"
APTSSSTKKTQLQLEHLLLDLQMILNGINNYKNPELTRMLTFKFYMPKKATELKHLQCLEEELKPLEEALNLAPSKNFHLRPRDLISNINVSVLELKGSETTFMCEYADETATIVEFLNRWITFSQSIISTLTGGGGSGGGGSGGGGSGGGGSESKYGPPCPPCPAPEFLGGPSVFLFPPKPKDTLMISRTPEVTCVVVDVSQEDPEVQFNWYVDGVEVHNAKTKPREEQFNSTYRVVSVLQVLHVDWLNGKEYKCKVSNKGLPSSIEKTISKAKGQPREPQVYTLPPSQEEMTKNQVSLTCLVKGFYPSDIVVEWESNGQPENNYKTTPPVLDSDGSFFLYSKLTVDKSRWQEGNVFSCSVMHEALHNHYTQKSLSLSLGK

SEQ ID NO: 338 - protein, 382 aa, Artificial Sequence
  source: /note="Description of Artificial Sequence: Synthetic polypeptide"
APTSSSTKKTQLQLEHLLLDLQMILNGINNYKNPKLTQMLTFKFYMPKKATELKHLQCLEEELKPLEEALNLAPSKNFHLRPRDLISNINVIVLELKGSETTFMCEYADETATIVEFLNRWITFSQSIISTLTGGGGSGGGGSGGGGSGGGGSESKYGPPCPPCPAPEFLGGPSVFLFPPKPKDTLMISRTPEVTCVVVDVSQEDPEVQFNWYVDGVEVHNAKTKPREEQFNSTYRVVSVLQVLHVDWLNGKEYKCKVSNKGLPSSIEKTISKAKGQPREPQVYTLPPSQEEMTKNQVSLTCLVKGFYPSDIVVEWESNGQPENNYKTTPPVLDSDGSFFLYSKLTVDKSRWQEGNVFSCSVMHEALHNHYTQKSLSLSLGK

SEQ ID NO: 339 - protein, 382 aa, Artificial Sequence
  source: /note="Description of Artificial Sequence: Synthetic polypeptide"
APTSSSTKKTQLQLENLLLDLQMILNGINNYKNPKLTQMLTFKFYMPKKATELKHLQCLEEELKPLEEALNLAPSKNFHLRPRDLISNINVIVLELKGSETTFMCEYADETATIVEFLNRWITFSQSIISTLTGGGGSGGGGSGGGGSGGGGSESKYGPPCPPCPAPEFLGGPSVFLFPPKPKDTLMISRTPEVTCVVVDVSQEDPEVQFNWYVDGVEVHNAKTKPREEQFNSTYRVVSVLQVLHVDWLNGKEYKCKVSNKGLPSSIEKTISKAKGQPREPQVYTLPPSQEEMTKNQVSLTCLVKGFYPSDIVVEWESNGQPENNYKTTPPVLDSDGSFFLYSKLTVDKSRWQEGNVFSCSVMHEALHNHYTQKSLSLSLGK

SEQ ID NO: 340 - protein, 382 aa, Artificial Sequence
  source: /note="Description of Artificial Sequence: Synthetic polypeptide"
APTSSSTKKTQLQLELLLLDLQMILNGINNYKNPKLTQMLTFKFYMPKKATELKHLQCLEEELKPLEEALNLAPSKNFHLRPRDLISNINVIVLELKGSETTFMCEYADETATIVEFLNRWITFSQSIISTLTGGGGSGGGGSGGGGSGGGGSESKYGPPCPPCPAPEFLGGPSVFLFPPKPKDTLMISRTPEVTCVVVDVSQEDPEVQFNWYVDGVEVHNAKTKPREEQFNSTYRVVSVLQVLHVDWLNGKEYKCKVSNKGLPSSIEKTISKAKGQPREPQVYTLPPSQEEMTKNQVSLTCLVKGFYPSDIVVEWESNGQPENNYKTTPPVLDSDGSFFLYSKLTVDKSRWQEGNVFSCSVMHEALHNHYTQKSLSLSLGK

SEQ ID NO: 341 - protein, 382 aa, Artificial Sequence
  source: /note="Description of Artificial Sequence: Synthetic polypeptide"
APTSSSTKKTQLQLEHLLLDLQMILNGINNYKNPKLTQMLTFKFYMPKKATELKHLQCLEEELKPLEEALNLAPSKNFHLRPRVLISNINVIVLELKGSETTFMCEYADETATIVEFLNRWITFSQSIISTLTGGGGSGGGGSGGGGSGGGGSESKYGPPCPPCPAPEFLGGPSVFLFPPKPKDTLMISRTPEVTCVVVDVSQEDPEVQFNWYVDGVEVHNAKTKPREEQFNSTYRVVSVLQVLHVDWLNGKEYKCKVSNKGLPSSIEKTISKAKGQPREPQVYTLPPSQEEMTKNQVSLTCLVKGFYPSDIVVEWESNGQPENNYKTTPPVLDSDGSFFLYSKLTVDKSRWQEGNVFSCSVMHEALHNHYTQKSLSLSLGK

SEQ ID NO: 342 - protein, 382 aa, Artificial Sequence
  source: /note="Description of Artificial Sequence: Synthetic polypeptide"
APTSSSTKKTQLQLEHLLLDLQMILNGINNYKNPKLTQMLTFKFYMPKKATELKHLQCLEEELKPLEEALNLAPSKNFHLRPRDLISNINVSVLELKGSETTFMCEYADETATIVEFLNRWITFSQSIISTLTGGGGSGGGGSGGGGSGGGGSESKYGPPCPPCPAPEFLGGPSVFLFPPKPKDTLMISRTPEVTCVVVDVSQEDPEVQFNWYVDGVEVHNAKTKPREEQFNSTYRVVSVLQVLHVDWLNGKEYKCKVSNKGLPSSIEKTISKAKGQPREPQVYTLPPSQEEMTKNQVSLTCLVKGFYPSDIVVEWESNGQPENNYKTTPPVLDSDGSFFLYSKLTVDKSRWQEGNVFSCSVMHEALHNHYTQKSLSLSLGK

SEQ ID NO: 343 - protein, 382 aa, Artificial Sequence
  source: /note="Description of Artificial Sequence: Synthetic polypeptide"
APTSSSTKKTQLQLEHLLLDLQMILNGINNYKNPKLTNMLTFKFYMPKKATELKHLQCLEEELKPLEEALNLAPSKNFHLRPRDLISNINVIVLELKGSETTFMCEYADETATIVEFLNRWITFSQSIISTLTGGGGSGGGGSGGGGSGGGGSESKYGPPCPPCPAPEFLGGPSVFLFPPKPKDTLMISRTPEVTCVVVDVSQEDPEVQFNWYVDGVEVHNAKTKPREEQFNSTYRVVSVLQVLHVDWLNGKEYKCKVSNKGLPSSIEKTISKAKGQPREPQVYTLPPSQEEMTKNQVSLTCLVKGFYPSDIVVEWESNGQPENNYKTTPPVLDSDGSFFLYSKLTVDKSRWQEGNVFSCSVMHEALHNHYTQKSLSLSLGK

SEQ ID NO: 344 - protein, 382 aa, Artificial Sequence
  source: /note="Description of Artificial Sequence: Synthetic polypeptide"
APTSSSTKKTQLQLENLLLDLQMILNGINNYKNPKLTNMLTFKFYMPKKATELKHLQCLEEELKPLEEALNLAPSKNFHLRPRDLISNINVIVLELKGSETTFMCEYADETATIVEFLNRWITFSQSIISTLTGGGGSGGGGSGGGGSGGGGSESKYGPPCPPCPAPEFLGGPSVFLFPPKPKDTLMISRTPEVTCVVVDVSQEDPEVQFNWYVDGVEVHNAKTKPREEQFNSTYRVVSVLQVLHVDWLNGKEYKCKVSNKGLPSSIEKTISKAKGQPREPQVYTLPPSQEEMTKNQVSLTCLVKGFYPSDIVVEWESNGQPENNYKTTPPVLDSDGSFFLYSKLTVDKSRWQEGNVFSCSVMHEALHNHYTQKSLSLSLGK

SEQ ID NO: 345 - protein, 382 aa, Artificial Sequence
  source: /note="Description of Artificial Sequence: Synthetic polypeptide"
APTSSSTKKTQLQLELLLLDLQMILNGINNYKNPKLTNMLTFKFYMPKKATELKHLQCLEEELKPLEEALNLAPSKNFHLRPRDLISNINVIVLELKGSETTFMCEYADETATIVEFLNRWITFSQSIISTLTGGGGSGGGGSGGGGSGGGGSESKYGPPCPPCPAPEFLGGPSVFLFPPKPKDTLMISRTPEVTCVVVDVSQEDPEVQFNWYVDGVEVHNAKTKPREEQFNSTYRVVSVLQVLHVDWLNGKEYKCKVSNKGLPSSIEKTISKAKGQPREPQVYTLPPSQEEMTKNQVSLTCLVKGFYPSDIVVEWESNGQPENNYKTTPPVLDSDGSFFLYSKLTVDKSRWQEGNVFSCSVMHEALHNHYTQKSLSLSLGK

SEQ ID NO: 346 - protein, 382 aa, Artificial Sequence
  source: /note="Description of Artificial Sequence: Synthetic polypeptide"
APTSSSTKKTQLQLEHLLLDLQMILNGINNYKNPKLTNMLTFKFYMPKKATELKHLQCLEEELKPLEEALNLAPSKNFHLRPRVLISNINVIVLELKGSETTFMCEYADETATIVEFLNRWITFSQSIISTLTGGGGSGGGGSGGGGSGGGGSESKYGPPCPPCPAPEFLGGPSVFLFPPKPKDTLMISRTPEVTCVVVDVSQEDPEVQFNWYVDGVEVHNAKTKPREEQFNSTYRVVSVLQVLHVDWLNGKEYKCKVSNKGLPSSIEKTISKAKGQPREPQVYTLPPSQEEMTKNQVSLTCLVKGFYPSDIVVEWESNGQPENNYKTTPPVLDSDGSFFLYSKLTVDKSRWQEGNVFSCSVMHEALHNHYTQKSLSLSLGK

SEQ ID NO: 347 - protein, 382 aa, Artificial Sequence
  source: /note="Description of Artificial Sequence: Synthetic polypeptide"
APTSSSTKKTQLQLEHLLLDLQMILNGINNYKNPKLTNMLTFKFYMPKKATELKHLQCLEEELKPLEEALNLAPSKNFHLRPRDLISNINVSVLELKGSETTFMCEYADETATIVEFLNRWITFSQSIISTLTGGGGSGGGGSGGGGSGGGGSESKYGPPCPPCPAPEFLGGPSVFLFPPKPKDTLMISRTPEVTCVVVDVSQEDPEVQFNWYVDGVEVHNAKTKPREEQFNSTYRVVSVLQVLHVDWLNGKEYKCKVSNKGLPSSIEKTISKAKGQPREPQVYTLPPSQEEMTKNQVSLTCLVKGFYPSDIVVEWESNGQPENNYKTTPPVLDSDGSFFLYSKLTVDKSRWQEGNVFSCSVMHEALHNHYTQKSLSLSLGK

SEQ ID NO: 348 - protein, 382 aa, Artificial Sequence
  source: /note="Description of Artificial Sequence: Synthetic polypeptide"
APTSSSTKKTQLQLEHLLLDLQMILNGINNYKNPKLTEMLTFKFYMPKKATELKHLQCLEEELKPLEEALNLAPSKNFHLRPRDLISNINVIVLELKGSETTFMCEYADETATIVEFLNRWITFSQSIISTLTGGGGSGGGGSGGGGSGGGGSESKYGPPCPPCPAPEFLGGPSVFLFPPKPKDTLMISRTPEVTCVVVDVSQEDPEVQFNWYVDGVEVHNAKTKPREEQFNSTYRVVSVLQVLHVDWLNGKEYKCKVSNKGLPSSIEKTISKAKGQPREPQVYTLPPSQEEMTKNQVSLTCLVKGFYPSDIVVEWESNGQPENNYKTTPPVLDSDGSFFLYSKLTVDKSRWQEGNVFSCSVMHEALHNHYTQKSLSLSLGK

SEQ ID NO: 349 - protein, 382 aa, Artificial Sequence
  source: /note="Description of Artificial Sequence: Synthetic polypeptide"
APTSSSTKKTQLQLEHLLLDLQMILNGINNYKNPKLTRMLTKKFYMPKKATELKHLQCLEEELKPLEEALNLAPSKNFHLRPRDLISNINVIVLELKGSETTFMCEYADETATIVEFLNRWITFSQSIISTLTGGGGSGGGGSGGGGSGGGGSESKYGPPCPPCPAPEFLGGPSVFLFPPKPKDTLMISRTPEVTCVVVDVSQEDPEVQFNWYVDGVEVHNAKTKPREEQFNSTYRVVSVLQVLHVDWLNGKEYKCKVSNKGLPSSIEKTISKAKGQPREPQVYTLPPSQEEMTKNQVSLTCLVKGFYPSDIVVEWESNGQPENNYKTTPPVLDSDGSFFLYSKLTVDKSRWQEGNVFSCSVMHEALHNHYTQKSLSLSLGK

SEQ ID NO: 350 - protein, 382 aa, Artificial Sequence
  source: /note="Description of Artificial Sequence: Synthetic polypeptide"
APTSSSTKKTQLQLEHLLLDLQMILNGINNYKNPKLTRMLTQKFYMPKKATELKHLQCLEEELKPLEEALNLAPSKNFHLRPRDLISNINVIVLELKGSETTFMCEYADETATIVEFLNRWITFSQSIISTLTGGGGSGGGGSGGGGSGGGGSESKYGPPCPPCPAPEFLGGPSVFLFPPKPKDTLMISRTPEVTCVVVDVSQEDPEVQFNWYVDGVEVHNAKTKPREEQFNSTYRVVSVLQVLHVDWLNGKEYKCKVSNKGLPSSIEKTISKAKGQPREPQVYTLPPSQEEMTKNQVSLTCLVKGFYPSDIVVEWESNGQPENNYKTTPPVLDSDGSFFLYSKLTVDKSRWQEGNVFSCSVMHEALHNHYTQKSLSLSLGK

SEQ ID NO: 351 - protein, 382 aa, Artificial Sequence
  source: /note="Description of Artificial Sequence: Synthetic polypeptide"
APTSSSTKKTQLQLEHLLLDLQMILNGINNYKNPKLTRMLTAKFAMPKKATELKHLQCLEEELKPLEEALNGAPSKNFHLRPRDLISDINVIVLELKGSETTFMCEYADETATIVEFLNRWITFSQSIISTLTGGGGSGGGGSGGGGSGGGGSESKYGPPCPPCPAPEFLGGPSVFLFPPKPKDTLMISRTPEVTCVVVDVSQEDPEVQFNWYVDGVEVHNAKTKPREEQFNSTYRVVSVLQVLHVDWLNGKEYKCKVSNKGLPSSIEKTISKAKGQPREPQVYTLPPSQEEMTKNQVSLTCLVKGFYPSDIVVEWESNGQPENNYKTTPPVLDSDGSFFLYSKLTVDKSRWQEGNVFSCSVMHEALHNHYTQKSLSLSLGK

SEQ ID NO: 352 - protein, 382 aa, Artificial Sequence
  source: /note="Description of Artificial Sequence: Synthetic polypeptide"
APTSSSTKKTQLQLEHLLLDLQMILNGINNYKNPKLTNMLTFKFYMPKKATELKHLQCLEEELKPLEEALNLAPSKNFHLRPRDLIRNINVIVLELKGSETTFMCEYADETATIVEFLNRWITFSQSIISTLTGGGGSGGGGSGGGGSGGGGSESKYGPPCPPCPAPEFLGGPSVFLFPPKPKDTLMISRTPEVTCVVVDVSQEDPEVQFNWYVDGVEVHNAKTKPREEQFNSTYRVVSVLQVLHVDWLNGKEYKCKVSNKGLPSSIEKTISKAKGQPREPQVYTLPPSQEEMTKNQVSLTCLVKGFYPSDIVVEWESNGQPENNYKTTPPVLDSDGSFFLYSKLTVDKSRWQEGNVFSCSVMHEALHNHYTQKSLSLSLGK

SEQ ID NO: 353 - protein, 382 aa, Artificial Sequence
  source: /note="Description of Artificial Sequence: Synthetic polypeptide"
APTSSSTKKTQLQLENLLLDLQMILNGINNYKNPKLTEMLTFKFYMPKKATELKHLQCLEEELKPLEEALNLAPSKNFHLRPRDLISNINVIVLELKGSETTFMCEYADETATIVEFLNRWITFSQSIISTLTGGGGSGGGGSGGGGSGGGGSESKYGPPCPPCPAPEFLGGPSVFLFPPKPKDTLMISRTPEVTCVVVDVSQEDPEVQFNWYVDGVEVHNAKTKPREEQFNSTYRVVSVLQVLHVDWLNGKEYKCKVSNKGLPSSIEKTISKAKGQPREPQVYTLPPSQEEMTKNQVSLTCLVKGFYPSDIVVEWESNGQPENNYKTTPPVLDSDGSFFLYSKLTVDKSRWQEGNVFSCSVMHEALHNHYTQKSLSLSLGK

SEQ ID NO: 354 - protein, 382 aa, Artificial Sequence
  source: /note="Description of Artificial Sequence: Synthetic polypeptide"
APTSSSTKKTQLQLEHLLLDLQMILNGINNYKNPKLTEMLTFKFYMPKKATELKHLQCLEEELKPLEEALNLAPSKNFHLRPRVLISNINVIVLELKGSETTFMCEYADETATIVEFLNRWITFSQSIISTLTGGGGSGGGGSGGGGSGGGGSESKYGPPCPPCPAPEFLGGPSVFLFPPKPKDTLMISRTPEVTCVVVDVSQEDPEVQFNWYVDGVEVHNAKTKPREEQFNSTYRVVSVLQVLHVDWLNGKEYKCKVSNKGLPSSIEKTISKAKGQPREPQVYTLPPSQEEMTKNQVSLTCLVKGFYPSDIVVEWESNGQPENNYKTTPPVLDSDGSFFLYSKLTVDKSRWQEGNVFSCSVMHEALHNHYTQKSLSLSLGK

SEQ ID NO: 355 - protein, 382 aa, Artificial Sequence
  source: /note="Description of Artificial Sequence: Synthetic polypeptide"
APTSSSTKKTQLQLEHLLLDLQMILNGINNYKNPKLTEMLTFKFYMPKKATELKHLQCLEEELKPLEEALNLAPSKNFHLRPRDLIRNINVIVLELKGSETTFMCEYADETATIVEFLNRWITFSQSIISTLTGGGGSGGGGSGGGGSGGGGSESKYGPPCPPCPAPEFLGGPSVFLFPPKPKDTLMISRTPEVTCVVVDVSQEDPEVQFNWYVDGVEVHNAKTKPREEQFNSTYRVVSVLQVLHVDWLNGKEYKCKVSNKGLPSSIEKTISKAKGQPREPQVYTLPPSQEEMTKNQVSLTCLVKGFYPSDIVVEWESNGQPENNYKTTPPVLDSDGSFFLYSKLTVDKSRWQEGNVFSCSVMHEALHNHYTQKSLSLSLGK

SEQ ID NO: 356 - protein, 382 aa, Artificial Sequence
  source: /note="Description of Artificial Sequence: Synthetic polypeptide"
APTSSSTKKTQLQLEHLLLDLQMILNGINNYKNPKLTEMLTFKFYMPKKATELKHLQCLEEELKPLEEALNLAPSKNFHLRPRDLISNINVSVLELKGSETTFMCEYADETATIVEFLNRWITFSQSIISTLTGGGGSGGGGSGGGGSGGGGSESKYGPPCPPCPAPEFLGGPSVFLFPPKPKDTLMISRTPEVTCVVVDVSQEDPEVQFNWYVDGVEVHNAKTKPREEQFNSTYRVVSVLQVLHVDWLNGKEYKCKVSNKGLPSSIEKTISKAKGQPREPQVYTLPPSQEEMTKNQVSLTCLVKGFYPSDIVVEWESNGQPENNYKTTPPVLDSDGSFFLYSKLTVDKSRWQEGNVFSCSVMHEALHNHYTQKSLSLSLGK

SEQ ID NO: 357 - protein, 382 aa, Artificial Sequence
  source: /note="Description of Artificial Sequence: Synthetic polypeptide"
APTSSSTKKTQLQLENLLLDLQMILNGINNYKNPKLTRMLTQKFYMPKKATELKHLQCLEEELKPLEEALNLAPSKNFHLRPRDLISNINVIVLELKGSETTFMCEYADETATIVEFLNRWITFSQSIISTLTGGGGSGGGGSGGGGSGGGGSESKYGPPCPPCPAPEFLGGPSVFLFPPKPKDTLMISRTPEVTCVVVDVSQEDPEVQFNWYVDGVEVHNAKTKPREEQFNSTYRVVSVLQVLHVDWLNGKEYKCKVSNKGLPSSIEKTISKAKGQPREPQVYTLPPSQEEMTKNQVSLTCLVKGFYPSDIVVEWESNGQPENNYKTTPPVLDSDGSFFLYSKLTVDKSRWQEGNVFSCSVMHEALHNHYTQKSLSLSLGK

SEQ ID NO: 358 - protein, 382 aa, Artificial Sequence
  source: /note="Description of Artificial Sequence: Synthetic polypeptide"
APTSSSTKKTQLQLEHLLLDLQMILNGINNYKNPKLTRMLTQKFYMPKKATELKHLQCLEEELKPLEEALNLAPSKNFHLRPRDLISNINVSVLELKGSETTFMCEYADETATIVEFLNRWITFSQSIISTLTGGGGSGGGGSGGGGSGGGGSESKYGPPCPPCPAPEFLGGPSVFLFPPKPKDTLMISRTPEVTCVVVDVSQEDPEVQFNWYVDGVEVHNAKTKPREEQFNSTYRVVSVLQVLHVDWLNGKEYKCKVSNKGLPSSIEKTISKAKGQPREPQVYTLPPSQEEMTKNQVSLTCLVKGFYPSDIVVEWESNGQPENNYKTTPPVLDSDGSFFLYSKLTVDKSRWQEGNVFSCSVMHEALHNHYTQKSLSLSLGK

SEQ ID NO: 359 - protein, 382 aa, Artificial Sequence
  source: /note="Description of Artificial Sequence: Synthetic polypeptide"
APTSSSTKKTQLQLENLLLDLQMILNGINNYKNPELTNMLTFKFYMPKKATELKHLQCLEEELKPLEEALNLAPSKNFHLRPRDLISNINVIVLELKGSETTFMCEYADETATIVEFLNRWITFSQSIISTLTGGGGSGGGGSGGGGSGGGGSESKYGPPCPPCPAPEFLGGPSVFLFPPKPKDTLMISRTPEVTCVVVDVSQEDPEVQFNWYVDGVEVHNAKTKPREEQFNSTYRVVSVLQVLHVDWLNGKEYKCKVSNKGLPSSIEKTISKAKGQPREPQVYTLPPSQEEMTKNQVSLTCLVKGFYPSDIVVEWESNGQPENNYKTTPPVLDSDGSFFLYSKLTVDKSRWQEGNVFSCSVMHEALHNHYTQKSLSLSLGK

SEQ ID NO: 360 - protein, 153 aa, Homo sapiens
MYRMQLLSCIALSLALVTNSAPTSSSTKKTQLQLEHLLLDLQMILNGINNYKNPKLTRMLTFKFYMPKKATELKHLQCLEEELKPLEEVLNLAQSKNFHLRPRDLISNINVIVLELKGSETTFMCEYADETATIVEFLNRWITFCQSIISTLT

SEQ ID NO: 361 - DNA, 399 bp, Artificial Sequence
  source: /note="Description of Artificial Sequence: Synthetic polynucleotide"
gcccctacgtcctcctcaactaaaaagacgcaacttcagcttgagcatcttcttctcgaccttcagatgattttgaacggaatcaataattacaaaaatcctaaacttactagaatgctcacgtttaagttttatatgccaaaaaaggccactgagttgaaacaccttcaatgcttggaggaggaacttaaaccacttgaggaagtattgaatcttgctcagtccaaaaactttcatttgcggccacgagatctgataagcaacatcaacgtgatcgtcctggaactgaaaggaagcgaaacgacgtttatgtgcgaatatgcagacgaaactgcgacaatcgttgaatttctcaatcgatggatcacttttagccaatctatcatcagcacgttgact

SEQ ID NO: 362 - DNA, 399 bp, Artificial Sequence
  source: /note="Description of Artificial Sequence: Synthetic polynucleotide"
gcccctacgtcctcctcaactaaaaagacgcaacttcagcttgagcatcttcttctcgaccttcagatgattttgaacggaatcaataattacaaaaatcctaaacttactagaatgctcacgtttaagttttatatgccaaaaaaggccactgagttgaaacaccttcaatgcttggaggaggaacttaaaccacttgaggaagccttgaatcttgctccgtccaaaaactttcatttgcggccacgagatctgataagcaacatcaacgtgatcgtcctggaactgaaaggaagcgaaacgacgtttatgtgcgaatatgcagacgaaactgcgacaatcgttgaatttctcaatcgatggatcacttttagccaatctatcatcagcacgttgact

SEQ ID NO: 363 - DNA, 399 bp, Artificial Sequence
  source: /note="Description of Artificial Sequence: Synthetic polynucleotide"
gcccctacgtcctcctcaactaaaaagacgcaacttcagcttgaggatcttcttctcgaccttcagatgattttgaacggaatcaataattacaaaaatcctaaacttactagaatgctcacgtttaagttttatatgccaaaaaaggccactgagttgaaacaccttcaatgcttggaggaggaacttaaaccacttgaggaagccttgaatcttgctccgtccaaaaactttcatttgcggccacgagatctgataagcaacatcaacgtgatcgtcctggaactgaaaggaagcgaaacgacgtttatgtgcgaatatgcagacgaaactgcgacaatcgttgaatttctcaatcgatggatcacttttagccaatctatcatcagcacgttgact

SEQ ID NO: 364 - DNA, 399 bp, Artificial Sequence
  source: /note="Description of Artificial Sequence: Synthetic polynucleotide"
gcccctacgtcctcctcaactaaaaagacgcaacttcagcttgagaatcttcttctcgaccttcagatgattttgaacggaatcaataattacaaaaatcctaaacttactagaatgctcacgtttaagttttatatgccaaaaaaggccactgagttgaaacaccttcaatgcttggaggaggaacttaaaccacttgaggaagccttgaatcttgctccgtccaaaaactttcatttgcggccacgagatctgataagcaacatcaacgtgatcgtcctggaactgaaaggaagcgaaacgacgtttatgtgcgaatatgcagacgaaactgcgacaatcgttgaatttctcaatcgatggatcacttttagccaatctatcatcagcacgttgact

SEQ ID NO: 365 - DNA, 399 bp, Artificial Sequence
  source: /note="Description of Artificial Sequence: Synthetic polynucleotide"
gcccctacgtcctcctcaactaaaaagacgcaacttcagcttgagctgcttcttctcgaccttcagatgattttgaacggaatcaataattacaaaaatcctaaacttactagaatgctcacgtttaagttttatatgccaaaaaaggccactgagttgaaacaccttcaatgcttggaggaggaacttaaaccacttgaggaagccttgaatcttgctccgtccaaaaactttcatttgcggccacgagatctgataagcaacatcaacgtgatcgtcctggaactgaaaggaagcgaaacgacgtttatgtgcgaatatgcagacgaaactgcgacaatcgttgaatttctcaatcgatggatcacttttagccaatctatcatcagcacgttgact

SEQ ID NO: 366 - DNA, 399 bp, Artificial Sequence
  source: /note="Description of Artificial Sequence: Synthetic polynucleotide"
gcccctacgtcctcctcaactaaaaagacgcaacttcagcttgagcatcttcttctcgaccttcagatgattttgaacggaaccaataattacaaaaatcctaaacttactagaatgctcacgtttaagttttatatgccaaaaaaggccactgagttgaaacaccttcaatgcttggaggaggaacttaaaccacttgaggaagccttgaatcttgctccgtccaaaaactttcatttgcggccacgagatctgataagcaacatcaacgtgatcgtcctggaactgaaaggaagcgaaacgacgtttatgtgcgaatatgcagacgaaactgcgacaatcgttgaatttctcaatcgatggatcacttttagccaatctatcatcagcacgttgact

SEQ ID NO: 367 - DNA, 399 bp, Artificial Sequence
  source: /note="Description of Artificial Sequence: Synthetic polynucleotide"
gcccctacgtcctcctcaactaaaaagacgcaacttcagcttgagcatcttcttctcgaccttcagatgattttgaacggaatcaataattacaaaaatcctaaacttactagaatgctcacgtttaagttttatatgccaaaaaaggccactgagttgaaacaccttcaatgcttggaggaggaacttaaaccacttgaggaagccttgaatcttgctccgtccaaaaactttcatttgcggccacgagttctgataagcaacatcaacgtgatcgtcctggaactgaaaggaagcgaaacgacgtttatgtgcgaatatgcagacgaaactgcgacaatcgttgaatttctcaatcgatggatcacttttagccaatctatcatcagcacgttgact

SEQ ID NO: 368 - DNA, 399 bp, Artificial Sequence
  source: /note="Description of Artificial Sequence: Synthetic polynucleotide"
gcccctacgtcctcctcaactaaaaagacgcaacttcagcttgagcatcttcttctcgaccttcagatgattttgaacggaatcaataattacaaaaatcctaaacttactagaatgctcacgtttaagttttatatgccaaaaaaggccactgagttgaaacaccttcaatgcttggaggaggaacttaaaccacttgaggaagccttgaatcttgctccgtccaaaaactttcatttgcggccacgagatctgatacgtaacatcaacgtgatcgtcctggaactgaaaggaagcgaaacgacgtttatgtgcgaatatgcagacgaaactgcgacaatcgttgaatttctcaatcgatggatcacttttagccaatctatcatcagcacgttgact

SEQ ID NO: 369 - DNA, 399 bp, Artificial Sequence
  source: /note="Description of Artificial Sequence: Synthetic polynucleotide"
gcccctacgtcctcctcaactaaaaagacgcaacttcagcttgagcatcttcttctcgaccttcagatgattttgaacggaatcaataattacaaaaatcctaaacttactagaatgctcacgtttaagttttatatgccaaaaaaggccactgagttgaaacaccttcaatgcttggaggaggaacttaaaccacttgaggaagccttgaatcttgctccgtccaaaaactttcatttgcggccacgagatctgataagcctgatcaacgtgatcgtcctggaactgaaaggaagcgaaacgacgtttatgtgcgaatatgcagacgaaactgcgacaatcgttgaatttctcaatcgatggatcacttttagccaatctatcatcagcacgttgact

SEQ ID NO: 370 - DNA, 399 bp, Artificial Sequence
  source: /note="Description of Artificial Sequence: Synthetic polynucleotide"
gcccctacgtcctcctcaactaaaaagacgcaacttcagcttgagcatcttcttctcgaccttcagatgattttgaacggaatcaataattacaaaaatcctaaacttactagaatgctcacgtttaagttttatatgccaaaaaaggccactgagttgaaacaccttcaatgcttggaggaggaacttaaaccacttgaggaagccttgaatcttgctccgtccaaaaactttcatttgcggccacgagatctgataagcagcatcaacgtgatcgtcctggaactgaaaggaagcgaaacgacgtttatgtgcgaatatgcagacgaaactgcgacaatcgttgaatttctcaatcgatggatcacttttagccaatctatcatcagcacgttgact

SEQ ID NO: 371 - DNA, 399 bp, Artificial Sequence
  source: /note="Description of Artificial Sequence: Synthetic polynucleotide"
gcccctacgtcctcctcaactaaaaagacgcaacttcagcttgagcatcttcttctcgaccttcagatgattttgaacggaatcaataattacaaaaatcctaaacttactagaatgctcacgtttaagttttatatgccaaaaaaggccactgagttgaaacaccttcaatgcttggaggaggaacttaaaccacttgaggaagccttgaatcttgctccgtccaaaaactttcatttgcggccacgagatctgataagcaacatcaacgtgagcgtcctggaactgaaaggaagcgaaacgacgtttatgtgcgaatatgcagacgaaactgcgacaatcgttgaatttctcaatcgatggatcacttttagccaatctatcatcagcacgttgact

SEQ ID NO: 372 - DNA, 399 bp, Artificial Sequence
  source: /note="Description of Artificial Sequence: Synthetic polynucleotide"
gcccctacgtcctcctcaactaaaaagacgcaacttcagcttgagcatcttcttctcgaccttcagatgattttgaacggaatcaataattacaaaaatcctgaacttactagaatgctcacgtttaagttttatatgccaaaaaaggccactgagttgaaacaccttcaatgcttggaggaggaacttaaaccacttgaggaagccttgaatcttgctccgtccaaaaactttcatttgcggccacgagatctgataagcaacatcaacgtgatcgtcctggaactgaaaggaagcgaaacgacgtttatgtgcgaatatgcagacgaaactgcgacaatcgttgaatttctcaatcgatggatcacttttagccaatctatcatcagcacgttgact

SEQ ID NO: 373 - DNA, 399 bp, Artificial Sequence
  source: /note="Description of Artificial Sequence: Synthetic polynucleotide"
gcccctacgtcctcctcaactaaaaagacgcaacttcagcttgagaaccttcttctcgaccttcagatgattttgaacggaatcaataattacaaaaatcctgaacttactagaatgctcacgtttaagttttatatgccaaaaaaggccactgagttgaaacaccttcaatgcttggaggaggaacttaaaccacttgaggaagccttgaatcttgctccgtccaaaaactttcatttgcggccacgagatctgataagcaacatcaacgtgatcgtcctggaactgaaaggaagcgaaacgacgtttatgtgcgaatatgcagacgaaactgcgacaatcgttgaatttctcaatcgatggatcacttttagccaatctatcatcagcacgttgact

SEQ ID NO: 374 - DNA, 399 bp, Artificial Sequence
  source: /note="Description of Artificial Sequence: Synthetic polynucleotide"
gcccctacgtcctcctcaactaaaaagacgcaacttcagcttgagctgcttcttctcgaccttcagatgattttgaacggaatcaataattacaaaaatcctgaacttactagaatgctcacgtttaagttttatatgccaaaaaaggccactgagttgaaacaccttcaatgcttggaggaggaacttaaaccacttgaggaagccttgaatcttgctccgtccaaaaactttcatttgcggccacgagatctgataagcaacatcaacgtgatcgtcctggaactgaaaggaagcgaaacgacgtttatgtgcgaatatgcagacgaaactgcgacaatcgttgaatttctcaatcgatggatcacttttagccaatctatcatcagcacgttgact

SEQ ID NO: 375 - DNA, 399 bp, Artificial Sequence
  source: /note="Description of Artificial Sequence: Synthetic polynucleotide"
gcccctacgtcctcctcaactaaaaagacgcaacttcagcttgagcatcttcttctcgaccttcagatgattttgaacggaatcaataattacaaaaatcctgaacttactagaatgctcacgtttaagttttatatgccaaaaaaggccactgagttgaaacaccttcaatgcttggaggaggaacttaaaccacttgaggaagccttgaatcttgctccgtccaaaaactttcatttgcggccacgagtgctgataagcaacatcaacgtgatcgtcctggaactgaaaggaagcgaaacgacgtttatgtgcgaatatgcagacgaaactgcgacaatcgttgaatttctcaatcgatggatcacttttagccaatctatcatcagcacgttgact

SEQ ID NO: 376 - DNA, 399 bp, Artificial Sequence
  source: /note="Description of Artificial Sequence: Synthetic polynucleotide"
gcccctacgtcctcctcaactaaaaagacgcaacttcagcttgagcatcttcttctcgaccttcagatgattttgaacggaatcaataattacaaaaatcctgaacttactagaatgctcacgtttaagttttatatgccaaaaaaggccactgagttgaaacaccttcaatgcttggaggaggaacttaaaccacttgaggaagccttgaatcttgctccgtccaaaaactttcatttgcggccacgagatctgataagcaacatcaacgtgagcgtcctggaactgaaaggaagcgaaacgacgtttatgtgcgaatatgcagacgaaactgcgacaatcgttgaatttctcaatcgatggatcacttttagccaatctatcatcagcacgttgact

SEQ ID NO: 377 - DNA, 399 bp, Artificial Sequence
  source: /note="Description of Artificial Sequence: Synthetic polynucleotide"
gcccctacgtcctcctcaactaaaaagacgcaacttcagcttgagcatcttcttctcgaccttcagatgattttgaacggaatcaataattacaaaaatcctaaacttactcagatgctcacgtttaagttttatatgccaaaaaaggccactgagttgaaacaccttcaatgcttggaggaggaacttaaaccacttgaggaagccttgaatcttgctccgtccaaaaactttcatttgcggccacgagatctgataagcaacatcaacgtgatcgtcctggaactgaaaggaagcgaaacgacgtttatgtgcgaatatgcagacgaaactgcgacaatcgttgaatttctcaatcgatggatcacttttagccaatctatcatcagcacgttgact

SEQ ID NO: 378 - DNA, 399 bp, Artificial Sequence
  source: /note="Description of Artificial Sequence: Synthetic polynucleotide"
gcccctacgtcctcctcaactaaaaagacgcaacttcagcttgagaaccttcttctcgaccttcagatgattttgaacggaatcaataattacaaaaatcctaaacttactcagatgctcacgtttaagttttatatgccaaaaaaggccactgagttgaaacaccttcaatgcttggaggaggaacttaaaccacttgaggaagccttgaatcttgctccgtccaaaaactttcatttgcggccacgagatctgataagcaacatcaacgtgatcgtcctggaactgaaaggaagcgaaacgacgtttatgtgcgaatatgcagacgaaactgcgacaatcgttgaatttctcaatcgatggatcacttttagccaatctatcatcagcacgttgact

SEQ ID NO: 379 - DNA, 399 bp, Artificial Sequence
  source: /note="Description of Artificial Sequence: Synthetic polynucleotide"
gcccctacgtcctcctcaactaaaaagacgcaacttcagcttgagctgcttcttctcgaccttcagatgattttgaacggaatcaataattacaaaaatcctaaacttactcagatgctcacgtttaagttttatatgccaaaaaaggccactgagttgaaacaccttcaatgcttggaggaggaacttaaaccacttgaggaagccttgaatcttgctccgtccaaaaactttcatttgcggccacgagatctgataagcaacatcaacgtgatcgtcctggaactgaaaggaagcgaaacgacgtttatgtgcgaatatgcagacgaaactgcgacaatcgttgaatttctcaatcgatggatcacttttagccaatctatcatcagcacgttgact

SEQ ID NO: 380 - DNA, 399 bp, Artificial Sequence
  source: /note="Description of Artificial Sequence: Synthetic polynucleotide"
gcccctacgtcctcctcaactaaaaagacgcaacttcagcttgagcatcttcttctcgaccttcagatgattttgaacggaatcaataattacaaaaatcctaaacttactcagatgctcacgtttaagttttatatgccaaaaaaggccactgagttgaaacaccttcaatgcttggaggaggaacttaaaccacttgaggaagccttgaatcttgctccgtccaaaaactttcatttgcggccacgagtgctgataagcaacatcaacgtgatcgtcctggaactgaaaggaagcgaaacgacgtttatgtgcgaatatgcagacgaaactgcgacaatcgttgaatttctcaatcgatggatcacttttagccaatctatcatcagcacgttgact

SEQ ID NO: 381 - DNA, 399 bp, Artificial Sequence
  source: /note="Description of Artificial Sequence: Synthetic polynucleotide"
gcccctacgtcctcctcaactaaaaagacgcaacttcagcttgagcatcttcttctcgaccttcagatgattttgaacggaatcaataattacaaaaatcctaaacttactcagatgctcacgtttaagttttatatgccaaaaaaggccactgagttgaaacaccttcaatgcttggaggaggaacttaaaccacttgaggaagccttgaatcttgctccgtccaaaaactttcatttgcggccacgagatctgataagcaacatcaacgtgagcgtcctggaactgaaaggaagcgaaacgacgtttatgtgcgaatatgcagacgaaactgcgacaatcgttgaatttctcaatcgatggatcacttttagccaatctatcatcagcacgttgact

SEQ ID NO: 382 - DNA, 399 bp, Artificial Sequence
  source: /note="Description of Artificial Sequence: Synthetic polynucleotide"
gcccctacgtcctcctcaactaaaaagacgcaacttcagcttgagcatcttcttctcgaccttcagatgattttgaacggaatcaataattacaaaaatcctaaacttactaacatgctcacgtttaagttttatatgccaaaaaaggccactgagttgaaacaccttcaatgcttggaggaggaacttaaaccacttgaggaagccttgaatcttgctccgtccaaaaactttcatttgcggccacgagatctgataagcaacatcaacgtgatcgtcctggaactgaaaggaagcgaaacgacgtttatgtgcgaatatgcagacgaaactgcgacaatcgttgaatttctcaatcgatggatcacttttagccaatctatcatcagcacgttgact

SEQ ID NO: 383 - DNA, 399 bp, Artificial Sequence
  source: /note="Description of Artificial Sequence: Synthetic polynucleotide"
gcccctacgtcctcctcaactaaaaagacgcaacttcagcttgagaaccttcttctcgaccttcagatgattttgaacggaatcaataattacaaaaatcctaaacttactaacatgctcacgtttaagttttatatgccaaaaaaggccactgagttgaaacaccttcaatgcttggaggaggaacttaaaccacttgaggaagccttgaatcttgctccgtccaaaaactttcatttgcggccacgagatctgataagcaacatcaacgtgatcgtcctggaactgaaaggaagcgaaacgacgtttatgtgcgaatatgcagacgaaactgcgacaatcgttgaatttctcaatcgatggatcacttttagccaatctatcatcagcacgttgact

SEQ ID NO: 384 - DNA, 399 bp, Artificial Sequence
  source: /note="Description of Artificial Sequence: Synthetic polynucleotide"
gcccctacgtcctcctcaactaaaaagacgcaacttcagcttgagttgcttcttctcgaccttcagatgattttgaacggaatcaataattacaaaaatcctaaacttactaacatgctcacgtttaagttttatatgccaaaaaaggccactgagttgaaacaccttcaatgcttggaggaggaacttaaaccacttgaggaagccttgaatcttgctccgtccaaaaactttcatttgcggccacgagatctgataagcaacatcaacgtgatcgtcctggaactgaaaggaagcgaaacgacgtttatgtgcgaatatgcagacgaaactgcgacaatcgttgaatttctcaatcgatggatcacttttagccaatctatcatcagcacgttgact

SEQ ID NO: 385 - DNA, 399 bp, Artificial Sequence
  source: /note="Description of Artificial Sequence: Synthetic polynucleotide"
gcccctacgtcctcctcaactaaaaagacgcaacttcagcttgagcatcttcttctcgaccttcagatgattttgaacggaatcaataattacaaaaatcctaaacttactaacatgctcacgtttaagttttatatgccaaaaaaggccactgagttgaaacaccttcaatgcttggaggaggaacttaaaccacttgaggaagccttgaatcttgctccgtccaaaaactttcatttgcggccacgagtcctgataagcaacatcaacgtgatcgtcctggaactgaaaggaagcgaaacgacgtttatgtgcgaatatgcagacgaaactgcgacaatcgttgaatttctcaatcgatggatcacttttagccaatctatcatcagcacgttgact

SEQ ID NO: 386 - DNA, 399 bp, Artificial Sequence
  source: /note="Description of Artificial Sequence: Synthetic polynucleotide"
gcccctacgtcctcctcaactaaaaagacgcaacttcagcttgagcatcttcttctcgaccttcagatgattttgaacggaatcaataattacaaaaatcctaaacttactaacatgctcacgtttaagttttatatgccaaaaaaggccactgagttgaaacaccttcaatgcttggaggaggaacttaaaccacttgaggaagccttgaatcttgctccgtccaaaaactttcatttgcggccacgagatctgataagcaacatcaacgtgagcgtcctggaactgaaaggaagcgaaacgacgtttatgtgcgaatatgcagacgaaactgcgacaatcgttgaatttctcaatcgatggatcacttttagccaatctatcatcagcacgttgact

SEQ ID NO: 387 - DNA, 399 bp, Artificial Sequence
  source: /note="Description of Artificial Sequence: Synthetic polynucleotide"
gcccctacgtcctcctcaactaaaaagacgcaacttcagcttgagcatcttcttctcgaccttcagatgattttgaacggaatcaataattacaaaaatcctaaacttactgaaatgctcacgtttaagttttatatgccaaaaaaggccactgagttgaaacaccttcaatgcttggaggaggaacttaaaccacttgaggaagccttgaatcttgctccgtccaaaaactttcatttgcggccacgagatctgataagcaacatcaacgtgatcgtcctggaactgaaaggaagcgaaacgacgtttatgtgcgaatatgcagacgaaactgcgacaatcgttgaatttctcaatcgatggatcacttttagccaatctatcatcagcacgttgact

SEQ ID NO: 388 - DNA, 399 bp, Artificial Sequence
  source: /note="Description of Artificial Sequence: Synthetic polynucleotide"
gcccctacgtcctcctcaactaaaaagacgcaacttcagcttgagcatcttcttctcgaccttcagatgattttgaacggaatcaataattacaaaaatcctaaacttactagaatgctcacgaagaagttttatatgccaaaaaaggccactgagttgaaacaccttcaatgcttggaggaggaacttaaaccacttgaggaagccttgaatcttgctccgtccaaaaactttcatttgcggccacgagatctgataagcaacatcaacgtgatcgtcctggaactgaaaggaagcgaaacgacgtttatgtgcgaatatgcagacgaaactgcgacaatcgttgaatttctcaatcgatggatcacttttagccaatctatcatcagcacgttgact

SEQ ID NO: 389 - DNA, 399 bp, Artificial Sequence
  source: /note="Description of Artificial Sequence: Synthetic polynucleotide"
gcccctacgtcctcctcaactaaaaagacgcaacttcagcttgagcatcttcttctcgaccttcagatgattttgaacggaatcaataattacaaaaatcctaaacttactagaatgctcacgcagaagttttatatgccaaaaaaggccactgagttgaaacaccttcaatgcttggaggaggaacttaaaccacttgaggaagccttgaatcttgctccgtccaaaaactttcatttgcggccacgagatctgataagcaacatcaacgtgatcgtcctggaactgaaaggaagcgaaacgacgtttatgtgcgaatatgcagacgaaactgcgacaatcgttgaatttctcaatcgatggatcacttttagccaatctatcatcagcacgttgact

SEQ ID NO: 390 - DNA, 399 bp, Artificial Sequence
  source: /note="Description of Artificial Sequence: Synthetic polynucleotide"
gcccctacgtcctcctcaactaaaaagacgcaacttcagcttgagcatcttcttctcgaccttcagatgattttgaacggaatcaataattacaaaaatcctaaacttactagaatgctcacggcaaagtttgctatgccaaaaaaggccactgagttgaaacaccttcaatgcttggaggaggaacttaaaccacttgaggaagccttgaatggtgctccgtccaaaaactttcatttgcggccacgagatctgataagcgatatcaacgtgatcgtcctggaactgaaaggaagcgaaacgacgtttatgtgcgaatatgcagacgaaactgcgacaatcgttgaatttctcaatcgatggatcacttttagccaatctatcatcagcacgttgact

SEQ ID NO: 391 - DNA, 399 bp, Artificial Sequence
  source: /note="Description of Artificial Sequence: Synthetic polynucleotide"
gcccctacgtcctcctcaactaaaaagacgcaacttcagcttgagcatcttcttctcgaccttcagatgattttgaacggaatcaataattacaaaaatcctaaacttactaacatgctcacgtttaagttttatatgccaaaaaaggccactgagttgaaacaccttcaatgcttggaggaggaacttaaaccacttgaggaagccttgaatcttgctccgtccaaaaactttcatttgcggccacgagatctgataaggaacatcaacgtgatcgtcctggaactgaaaggaagcgaaacgacgtttatgtgcgaatatgcagacgaaactgcgacaatcgttgaatttctcaatcgatggatcacttttagccaatctatcatcagcacgttgact

SEQ ID NO: 392 - DNA, 399 bp, Artificial Sequence
  source: /note="Description of Artificial Sequence: Synthetic polynucleotide"
gcccctacgtcctcctcaactaaaaagacgcaacttcagcttgagaaccttcttctcgaccttcagatgattttgaacggaatcaataattacaaaaatcctaaacttactgaaatgctcacgtttaagttttatatgccaaaaaaggccactgagttgaaacaccttcaatgcttggaggaggaacttaaaccacttgaggaagccttgaatcttgctccgtccaaaaactttcatttgcggccacgagatctgataagcaacatcaacgtgatcgtcctggaactgaaaggaagcgaaacgacgtttatgtgcgaatatgcagacgaaactgcgacaatcgttgaatttctcaatcgatggatcacttttagccaatctatcatcagcacgttgact

SEQ ID NO: 393 - DNA, 399 bp, Artificial Sequence
  source: /note="Description of Artificial Sequence: Synthetic polynucleotide"
gcccctacgtcctcctcaactaaaaagacgcaacttcagcttgagcatcttcttctcgaccttcagatgattttgaacggaatcaataattacaaaaatcctaaacttactgaaatgctcacgtttaagttttatatgccaaaaaaggccactgagttgaaacaccttcaatgcttggaggaggaacttaaaccacttgaggaagccttgaatcttgctccgtccaaaaactttcatttgcggccacgagtcctgataagcaacatcaacgtgatcgtcctggaactgaaaggaagcgaaacgacgtttatgtgcgaatatgcagacgaaactgcgacaatcgttgaatttctcaatcgatggatcacttttagccaatctatcatcagcacgttgact

SEQ ID NO: 394 - DNA, 399 bp, Artificial Sequence
  source: /note="Description of Artificial Sequence: Synthetic polynucleotide"
gcccctacgtcctcctcaactaaaaagacgcaacttcagcttgagcatcttcttctcgaccttcagatgattttgaacggaatcaataattacaaaaatcctaaacttactgaaatgctcacgtttaagttttatatgccaaaaaaggccactgagttgaaacaccttcaatgcttggaggaggaacttaaaccacttgaggaagccttgaatcttgctccgtccaaaaactttcatttgcggccacgagatctgataaggaacatcaacgtgatcgtcctggaactgaaaggaagcgaaacgacgtttatgtgcgaatatgcagacgaaactgcgacaatcgttgaatttctcaatcgatggatcacttttagccaatctatcatcagcacgttgact

SEQ ID NO: 395 - DNA, 399 bp, Artificial Sequence
  source: /note="Description of Artificial Sequence: Synthetic polynucleotide"
gcccctacgtcctcctcaactaaaaagacgcaacttcagcttgagcatcttcttctcgaccttcagatgattttgaacggaatcaataattacaaaaatcctaaacttactgaaatgctcacgtttaagttttatatgccaaaaaaggccactgagttgaaacaccttcaatgcttggaggaggaacttaaaccacttgaggaagccttgaatcttgctccgtccaaaaactttcatttgcggccacgagatctgataagcaacatcaacgtgagcgtcctggaactgaaaggaagcgaaacgacgtttatgtgcgaatatgcagacgaaactgcgacaatcgttgaatttctcaatcgatggatcacttttagccaatctatcatcagcacgttgact

SEQ ID NO: 396 - DNA, 399 bp, Artificial Sequence
  source: /note="Description of Artificial Sequence: Synthetic polynucleotide"
gcccctacgtcctcctcaactaaaaagacgcaacttcagcttgagaaccttcttctcgaccttcagatgattttgaacggaatcaataattacaaaaatcctaaacttactagaatgctcacgcagaagttttatatgccaaaaaaggccactgagttgaaacaccttcaatgcttggaggaggaacttaaaccacttgaggaagccttgaatcttgctccgtccaaaaactttcatttgcggccacgagatctgataagcaacatcaacgtgatcgtcctggaactgaaaggaagcgaaacgacgtttatgtgcgaatatgcagacgaaactgcgacaatcgttgaatttctcaatcgatggatcacttttagccaatctatcatcagcacgttgact

SEQ ID NO: 397 - DNA, 399 bp, Artificial Sequence
  source: /note="Description of Artificial Sequence: Synthetic polynucleotide"
gcccctacgtcctcctcaactaaaaagacgcaacttcagcttgagcatcttcttctcgaccttcagatgattttgaacggaatcaataattacaaaaatcctaaacttactagaatgctcacgcagaagttttatatgccaaaaaaggccactgagttgaaacaccttcaatgcttggaggaggaacttaaaccacttgaggaagccttgaatcttgctccgtccaaaaactttcatttgcggccacgagatctgataagcaacatcaacgtgagcgtcctggaactgaaaggaagcgaaacgacgtttatgtgcgaatatgcagacgaaactgcgacaatcgttgaatttctcaatcgatggatcacttttagccaatctatcatcagcacgttgact

SEQ ID NO: 398 - DNA, 399 bp, Artificial Sequence
  source: /note="Description of Artificial Sequence: Synthetic polynucleotide"
gcccctacgtcctcctcaactaaaaagacgcaacttcagcttgagaaccttcttctcgaccttcagatgattttgaacggaatcaataattacaaaaatcctgaacttactaacatgctcacgtttaagttttatatgccaaaaaaggccactgagttgaaacaccttcaatgcttggaggaggaacttaaaccacttgaggaagccttgaatcttgctccgtccaaaaactttcatttgcggccacgagatctgataagcaacatcaacgtgatcgtcctggaactgaaaggaagcgaaacgacgtttatgtgcgaatatgcagacgaaactgcgacaatcgttgaatttctcaatcgatggatcacttttagccaatctatcatcagcacgttgact

SEQ ID NO: 399 - DNA, 681 bp, Homo sapiens
gataaaactcatacgtgcccaccctgccccgcaccggagctgcttgggggtccttccgtattcttgtttccgccgaagccgaaggacacgcttatgattagcaggactcccgaagtgacgtgcgtcgtagtggacgtgtcgcatgaggacccggaggtcaagttcaactggtatgtcgatggcgtagaagtacacaatgcaaagactaaaccccgcgaagaacagtacaattcgacatacagagtagtgagcgtcttgactgtgctgcaccaggactggctcaacggaaaggagtataagtgtaaagtatcgaataaggcacttcccgcacctatcgagaaaacgatctccaaggctaagggtcagccaagagaaccccaagtctacactctgccccctagccgcgacgagcttacgaaaaaccaggtgtcgctcacttgtttggtgaagggtttctatccgagcgatattgcggtagagtgggaatccaacgggcagccagagaacaattacaagacgacgccaccagtgctggattcggatgggagctttttcttgtactcaaagttgaccgtggataaaagccggtggcagcagggtaatgtgttttcatgctcggtaatgcacgaggccctccataaccattatacgcagaaaagcctttcgctctcacccgggaaa

SEQ ID NO: 400 - DNA, 681 bp, Artificial Sequence
  source: /note="Description of Artificial Sequence: Synthetic polynucleotide"
gataaaactcatacgtgcccaccctgccccgcaccggagctgcttgggggtccttccgtattcttgtttccgccgaagccgaaggacacgcttatgattagcaggactcccgaagtgacgtgcgtcgtagtggacgtgtcgcatgaggacccggaggtcaagttcaactggtatgtcgatggcgtagaagtacacaatgcaaagactaaaccccgcgaagaacagtacggttcgacatacagagtagtgagcgtcttgactgtgctgcaccaggactggctcaacggaaaggagtataagtgtaaagtatcgaataaggcacttcccgcacctatcgagaaaacgatctccaaggctaagggtcagccaagagaaccccaagtctacactctgccccctagccgcgacgagcttacgaaaaaccaggtgtcgctcacttgtttggtgaagggtttctatccgagcgatattgcggtagagtgggaatccaacgggcagccagagaacaattacaagacgacgccaccagtgctggattcggatgggagctttttcttgtactcaaagttgaccgtggataaaagccggtggcagcagggtaatgtgttttcatgctcggtaatgcacgaggccctccataaccattatacgcagaaaagcctttcgctctcacccgggaaa

SEQ ID NO: 401 - DNA, 681 bp, Artificial Sequence
  source: /note="Description of Artificial Sequence: Synthetic polynucleotide"
gataaaactcatacgtgcccaccctgccccgcaccggaggcagcagggggtccttccgtattcttgtttccgccgaagccgaaggacacgcttatgattagcaggactcccgaagtgacgtgcgtcgtagtcgacgtgtcgcatgaggacccggaggtcaagttcaactggtatgtcgatggcgtagaagtacacaatgcaaagactaaaccccgcgaagaacagtacaattcgacatacagagtagtgagcgtcttgactgtgctgcaccaggactggctcaacggaaaggagtataagtgtaaagtatcgaataaggcacttggtgcacctatcgagaaaacgatctccaaggctaagggtcagccaagagaaccccaagtctacactctgccccctagccgcgacgagcttacgaaaaaccaggtgtcgctcacttgtttggtgaagggtttctatccgagcgatattgcggtagagtgggaatccaacgggcagccagagaacaattacaagacgacgccaccagtgctggattcggatgggagctttttcttgtactcaaagttgaccgtggataaaagccggtggcagcagggtaatgtgttttcatgctcggtaatgcacgaggccctccataaccattatacgcagaaaagcctttcgctctcacccgggaaa

SEQ ID NO: 402 - DNA, 681 bp, Artificial Sequence
  source: /note="Description of Artificial Sequence: Synthetic polynucleotide"
gataaaactcatacgtgcccaccctgccccgcaccggagctgcttgggggtccttccgtattcttgtttccgccgaagccgaaggacacgcttatgattagcaggactcccgaagtgacgtgcgtcgtagtcgacgtgtcgcatgaggacccggaggtcaagttcaactggtatgtcgatggcgtagaagtacacaatgcaaagactaaaccccgcgaagaacagtacggttcgacatacagagtagtgagcgtcttgcaggtgctgcacgttgactggctcaacggaaaggagtataagtgtaaagtatcgaataaggcacttcccgcacctatcgagaaaacgatctccaaggctaagggtcagccaagagaaccccaagtctacactctgccccctagccgcgacgagcttacgaaaaaccaggtgtcgctcacttgtttggtgaagggtttctatccgagcgatattgtggtagagtgggaatccaacgggcagccagagaacaattacaagacgacgccaccagtgctggattcggatgggagctttttcttgtactcaaagttgaccgtggataaaagccggtggcagcagggtaatgtgttttcatgctcggtaatgcacgaggccctccataaccattatacgcagaaaagcctttcgctctcacccgggaaa

SEQ ID NO: 403 - DNA, 681 bp, Artificial Sequence
  source: /note="Description of Artificial Sequence: Synthetic polynucleotide"
gataaaactcatacgtgcccaccctgccccgcaccggaggcagcaggtggtccttccgtattcttgtttccgccgaagccgaaggacacgcttatgattagcaggactcccgaagtgacgtgcgtcgtagtcgacgtgtcgcatgaggacccggaggtcaagttcaactggtatgtcgatggcgtagaagtacacaatgcaaagactaaaccccgcgaagaacagtacaattcgacatacagagtagtgagcgtcttgcaggtgctgcacgttgactggctcaacggaaaggagtataagtgtaaagtatcgaataaggcacttggtgcacctatcgagaaaacgatctccaaggctaagggtcagccaagagaaccccaagtctacactctgccccctagccgcgacgagcttacgaaaaaccaggtgtcgctcacttgtttggtgaagggtttctatccgagcgatattgtggtagagtgggaatccaacgggcagccagagaacaattacaagacgacgccaccagtgctggattcggatgggagctttttcttgtactcaaagttgaccgtggataaaagccggtggcagcagggtaatgtgttttcatgctcggtaatgcacgaggccctccataaccattatacgcagaaaagcctttcgctctcacccgggaaa

SEQ ID NO: 404 - DNA, 687 bp, Artificial Sequence
  source: /note="Description of Artificial Sequence: Synthetic polynucleotide"
gaaagtaagtatggccctccttgccctccgtgccctgcacctgagttcctcggcggtccttcagtgtttttgtttccacccaaacctaaagacacccttatgatctctcgaacacctgaagtaacctgtgtagttgttgatgtctcacaggaagatccggaggttcaatttaattggtacgtcgatggtgttgaagtgcataatgcgaagactaagccgagagaggaacagttcaattccacttatcgcgtggtttcagtccttacagtcttgcaccaagattggcttaacggaaaggaatataagtgcaaggtaagtaataaagggcttccatcaagcattgaaaaaaccataagtaaagcaaaaggacaaccgagggagccccaagtctacacgcttcctccttctcaggaggagatgaccaaaaaccaggtaagtttgacgtgtttggtaaaggggttttatccctcagatattgctgtcgaatgggagtctaatggtcagcctgagaacaattacaagactacgccacccgttctggattcagacggatctttcttcctctacagcagattgacggtagacaaaagccgctggcaagagggcaatgtcttcagttgttctgtaatgcacgaagccctccataatcactacacgcagaaatctctgagcttgtctcttgggaaa

SEQ ID NO: 405 - DNA, 687 bp, Artificial Sequence
  source: /note="Description of Artificial Sequence: Synthetic polynucleotide"
gaaagtaagtatggccctccttgccctccgtgccctgcacctgagttcctcggcggtccttcagtgtttttgtttccacccaaacctaaagacacccttatgatctctcgaacacctgaagtaacctgtgtagttgttgatgtctcacaggaagatccggaggttcaatttaattggtacgtcgatggtgttgaagtgcataatgcgaagactaagccgagagaggaacagttcaattccacttatcgcgtggtttcagtccttacagtcttgcaccaagattggcttaacggaaaggaatataagtgcaaggtaagtaataaagggcttccatcaagcattgaaaaaaccataagtaaagcaaaaggacaaccgagggagccccaagtctacacgcttcctccttctcaggaggagatgaccaaaaaccaggtaagtttgacgtgtttggtaaaggggttttatccctcagatattgctgtcgaatgggagtctaatggtcagcctgagaacaattacaagactacgccacccgttctggattcagacggatctttcttcctctacagcaaattgacggtagacaaaagccgctggcaagagggcaatgtcttcagttgttctgtaatgcacgaagccctccataatcactacacgcagaaatctctgagcttgtctcttgggaaa

SEQ ID NO: 406 - DNA, 687 bp, Artificial Sequence
  source: /note="Description of Artificial Sequence: Synthetic polynucleotide"
gaaagtaagtatggccctccttgccctccgtgccctgcacctgagttcctcggcggtccttcagtgtttttgtttccacccaaacctaaagacacccttatgatctctcgaacacctgaagtaacctgtgtagttgttgatgtctcacaggaagatccggaggttcaatttaattggtacgtcgatggtgttgaagtgcataatgcgaagactaagccgagagaggaacagttcaattccacttatcgcgtggtttcagtccttcaggtcttgcacgtggattggcttaacggaaaggaatataagtgcaaggtaagtaataaagggcttccatcaagcattgaaaaaaccataagtaaagcaaaaggacaaccgagggagccccaagtctacacgcttcctccttctcaggaggagatgaccaaaaaccaggtaagtttgacgtgtttggtaaaggggttttatccctcagatattgttgtcgaatgggagtctaatggtcagcctgagaacaattacaagactacgccacccgttctggattcagacggatctttcttcctctacagcagattgacggtagacaaaagccgctggcaagagggcaatgtcttcagttgttctgtaatgcacgaagccctccataatcactacacgcagaaatctctgagcttgtctcttgggaaa

SEQ ID NO: 407 - DNA, 687 bp, Artificial Sequence
  source: /note="Description of Artificial Sequence: Synthetic polynucleotide"
gaaagtaagtatggccctccttgccctccgtgccctgcacctgagttcctcggcggtccttcagtgtttttgtttccacccaaacctaaagacacccttatgatctctcgaacacctgaagtaacctgtgtagttgttgatgtctcacaggaagatccggaggttcaatttaattggtacgtcgatggtgttgaagtgcataatgcgaagactaagccgagagaggaacagttcaattccacttatcgcgtggtttcagtccttcaggtcttgcacgtggattggcttaacggaaaggaatataagtgcaaggtaagtaataaagggcttccatcaagcattgaaaaaaccataagtaaagcaaaaggacaaccgagggagccccaagtctacacgcttcctccttctcaggaggagatgaccaaaaaccaggtaagtttgacgtgtttggtaaaggggttttatccctcagatattgttgtcgaatgggagtctaatggtcagcctgagaacaattacaagactacgccacccgttctggattcagacggatctttcttcctctacagcaaattgacggtagacaaaagccgctggcaagagggcaatgtcttcagttgttctgtaatgcacgaagccctccataatcactacacgcagaaatctctgagcttgtctcttgggaaa

SEQ ID NO: 408 - DNA, 60 bp, Artificial Sequence
  source: /note="Description of Artificial Sequence: Synthetic oligonucleotide"
ggtggtggaggatcgggaggtggaggatctggaggaggaggatcgggtggaggaggatcc

SEQ ID NO: 409 - DNA, 108 bp, Artificial Sequence
  source: /note="Description of Artificial Sequence: Synthetic polynucleotide"
gcgggctcaggcggctcaggcggaagcggcgggtctccagtgccttcaacccctcccaccaattcaagctccaccccaccgacaccatcaccgtcagcctctggaagc

SEQ ID NO: 410 - DNA, 132 bp, Artificial Sequence
  source: /note="Description of Artificial Sequence: Synthetic polynucleotide"
gcaggaagtggcggatccggcggttctggtggttctcctgtgccttctactcctccaactcccagtccgagtaccccacccactccgtcaccttccggtggtagcggtaattctagtggcagtggcggatca

SEQ ID NO: 411 - DNA, 144 bp, Artificial Sequence
  source: /note="Description of Artificial Sequence: Synthetic polynucleotide"
gcaggctctgggaattcatccggctctggtggaagtggcgggtcaggtaattcaagcgggtctggcggtagccctgtgccatccacaccgccaactccatctccctctactcctccaacgccaagcccctcagcatccggatct

SEQ ID NO: 412 - DNA, 72 bp, Artificial Sequence
  source: /note="Description of Artificial Sequence: Synthetic oligonucleotide"
gcggaagcggcggctaaagaggcagccgctaaggaagcagccgctaaggaagcggcagcgaaggctggtagc

SEQ ID NO: 413 - DNA, 75 bp, Artificial Sequence
  source: /note="Description of Artificial Sequence: Synthetic oligonucleotide"
ggcaccaccccaaatcccccggccagtagctccaccacaggctcatccaccccaacgaaccccccggcaggttca

SEQ ID NO: 414 - DNA, 111 bp, Artificial Sequence
  source: /note="Description of Artificial Sequence: Synthetic polynucleotide"
gctgggtcacctggtgctggcaacggtggtaacaacggtggtaatcctcctcccccgactaccacgactagcagcgccccggctacgaccactacggcgtccgcagggtca

SEQ ID NO: 415 - DNA, 66 bp, Artificial Sequence
  source: /note="Description of Artificial Sequence: Synthetic oligonucleotide"
ggcggcggtagtgccggagggggatctgccggcggtggatcagcgggtggcggctctgcgggaagc

SEQ ID NO: 416 - DNA, 1140 bp, Artificial Sequence
  source: /note="Description of Artificial Sequence: Synthetic polynucleotide"
gcccctacgtcctcctcaactaaaaagacgcaacttcagcttgagcatcttcttctcgaccttcagatgattttgaacggaatcaataattacaaaaatcctaaacttactagaatgctcacgtttaagttttatatgccaaaaaaggccactgagttgaaacaccttcaatgcttggaggaggaacttaaaccacttgaggaagtattgaatcttgctcagtccaaaaactttcatttgcggccacgagatctgataagcaacatcaacgtgatcgtcctggaactgaaaggaagcgaaacgacgtttatgtgcgaatatgcagacgaaactgcgacaatcgttgaatttctcaatcgatggatcacttttagccaatctatcatcagcacgttgactggtggtggaggatcgggaggtggaggatctggaggaggaggatcgggtggaggaggatccgataaaactcatacgtgcccaccctgccccgcaccggagctgcttgggggtccttccgtattcttgtttccgccgaagccgaaggacacgcttatgattagcaggactcccgaagtgacgtgcgtcgtagtggacgtgtcgcatgaggacccggaggtcaagttcaactggtatgtcgatggcgtagaagtacacaatgcaaagactaaaccccgcgaagaacagtacggttcgacatacagagtagtgagcgtcttgactgtgctgcaccaggactggctcaacggaaaggagtataagtgtaaagtatcgaataaggcacttcccgcacctatcgagaaaacgatctccaaggctaagggtcagccaagagaaccccaagtctacactctgccccctagccgcgacgagcttacgaaaaaccaggtgtcgctcacttgtttggtgaagggtttctatccgagcgatattgcggtagagtgggaatccaacgggcagccagagaacaattacaagacgacgccaccagtgctggattcggatgggagctttttcttgtactcaaagttgaccgtggataaaagccggtggcagcagggtaatgtgttttcatgctcggtaatgcacgaggccctccataaccattatacgcagaaaagcctttcgctctcacccgggaaa

SEQ ID NO: 417 - DNA, 1140 bp, Artificial Sequence
  source: /note="Description of Artificial Sequence: Synthetic polynucleotide"
gcccctacgtcctcctcaactaaaaagacgcaacttcagcttgagcatcttcttctcgaccttcagatgattttgaacggaatcaataattacaaaaatcctaaacttactagaatgctcacgtttaagttttatatgccaaaaaaggccactgagttgaaacaccttcaatgcttggaggaggaacttaaaccacttgaggaagccttgaatcttgctccgtccaaaaactttcatttgcggccacgagatctgataagcaacatcaacgtgatcgtcctggaactgaaaggaagcgaaacgacgtttatgtgcgaatatgcagacgaaactgcgacaatcgttgaatttctcaatcgatggatcacttttagccaatctatcatcagcacgttgactggtggtggaggatcgggaggtggaggatctggaggaggaggatcgggtggaggaggatccgataaaactcatacgtgcccaccctgccccgcaccggagctgcttgggggtccttccgtattcttgtttccgccgaagccgaaggacacgcttatgattagcaggactcccgaagtgacgtgcgtcgtagtggacgtgtcgcatgaggacccggaggtcaagttcaactggtatgtcgatggcgtagaagtacacaatgcaaagactaaaccccgcgaagaacagtacggttcgacatacagagtagtgagcgtcttgactgtgctgcaccaggactggctcaacggaaaggagtataagtgtaaagtatcgaataaggcacttcccgcacctatcgagaaaacgatctccaaggctaagggtcagccaagagaaccccaagtctacactctgccccctagccgcgacgagcttacgaaaaaccaggtgtcgctcacttgtttggtgaagggtttctatccgagcgatattgcggtagagtgggaatccaacgggcagccagagaacaattacaagacgacgccaccagtgctggattcggatgggagctttttcttgtactcaaagttgaccgtggataaaagccggtggcagcagggtaatgtgttttcatgctcggtaatgcacgaggccctccataaccattatacgcagaaaagcctttcgctctcacccgggaaa

SEQ ID NO: 418 - DNA, 1140 bp, Artificial Sequence
  source: /note="Description of Artificial Sequence: Synthetic polynucleotide"
gcccctacgtcctcctcaactaaaaagacgcaacttcagcttgaggatcttcttctcgaccttcagatgattttgaacggaatcaataattacaaaaatcctaaacttactagaatgctcacgtttaagttttatatgccaaaaaaggccactgagttgaaacaccttcaatgcttggaggaggaacttaaaccacttgaggaagccttgaatcttgctccgtccaaaaactttcatttgcggccacgagatctgataagcaacatcaacgtgatcgtcctggaactgaaaggaagcgaaacgacgtttatgtgcgaatatgcagacgaaactgcgacaatcgttgaatttctcaatcgatggatcacttttagccaatctatcatcagcacgttgactggtggtggaggatcgggaggtggaggatctggaggaggaggatcgggtggaggaggatccgataaaactcatacgtgcccaccctgccccgcaccggagctgcttgggggtccttccgtattcttgtttccgccgaagccgaaggacacgcttatgattagcaggactcccgaagtgacgtgcgtcgtagtggacgtgtcgcatgaggacccggaggtcaagttcaactggtatgtcgatggcgtagaagtacacaatgcaaagactaaaccccgcgaagaacagtacggttcgacatacagagtagtgagcgtcttgactgtgctgcaccaggactggctcaacggaaaggagtataagtgtaaagtatcgaataaggcacttcccgcacctatcgagaaaacgatctccaaggctaagggtcagccaagagaaccccaagtctacactctgccccctagccgcgacgagcttacgaaaaaccaggtgtcgctcacttgtttggtgaagggtttctatccgagcgatattgcggtagagtgggaatccaacgggcagccagagaacaattacaagacgacgccaccagtgctggattcggatgggagctttttcttgtactcaaagttgaccgtggataaaagccggtggcagcagggtaatgtgttttcatgctcggtaatgcacgaggccctccataaccattatacgcagaaaagcctttcgctctcacccgggaaa

SEQ ID NO: 419 - DNA, 1140 bp, Artificial Sequence
  source: /note="Description of Artificial Sequence: Synthetic polynucleotide"
gcccctacgtcctcctcaactaaaaagacgcaacttcagcttgagaatcttcttctcgaccttcagatgattttgaacggaatcaataattacaaaaatcctaaacttactagaatgctcacgtttaagttttatatgccaaaaaaggccactgagttgaaacaccttcaatgcttggaggaggaacttaaaccacttgaggaagccttgaatcttgctccgtccaaaaactttcatttgcggccacgagatctgataagcaacatcaacgtgatcgtcctggaactgaaaggaagcgaaacgacgtttatgtgcgaatatgcagacgaaactgcgacaatcgttgaatttctcaatcgatggatcacttttagccaatctatcatcagcacgttgactggtggtggaggatcgggaggtggaggatctggaggaggaggatcgggtggaggaggatccgataaaactcatacgtgcccaccctgccccgcaccggagctgcttgggggtccttccgtattcttgtttccgccgaagccgaaggacacgcttatgattagcaggactcccgaagtgacgtgcgtcgtagtggacgtgtcgcatgaggacccggaggtcaagttcaactggtatgtcgatggcgtagaagtacacaatgcaaagactaaaccccgcgaagaacagtacggttcgacatacagagtagtgagcgtcttgactgtgctgcaccaggactggctcaacggaaaggagtataagtgtaaagtatcgaataaggcacttcccgcacctatcgagaaaacgatctccaaggctaagggtcagccaagagaaccccaagtctacactctgccccctagccgcgacgagcttacgaaaaaccaggtgtcgctcacttgtttggtgaagggtttctatccgagcgatattgcggtagagtgggaatccaacgggcagccagagaacaattacaagacgacgccaccagtgctggattcggatgggagctttttcttgtactcaaagttgaccgtggataaaagccggtggcagcagggtaatgtgttttcatgctcggtaatgcacgaggccctccataaccattatacgcagaaaagcctttcgctctcacccgggaaa

SEQ ID NO: 420 - DNA, 1140 bp, Artificial Sequence
  source: /note="Description of Artificial Sequence: Synthetic polynucleotide"
gcccctacgtcctcctcaactaaaaagacgcaacttcagcttgagctgcttcttctcgaccttcagatgattttgaacggaatcaataattacaaaaatcctaaacttactagaatgctcacgtttaagttttatatgccaaaaaaggccactgagttgaaacaccttcaatgcttggaggaggaacttaaaccacttgaggaagccttgaatcttgctccgtccaaaaactttcatttgcggccacgagatctgataagcaacatcaacgtgatcgtcctggaactgaaaggaagcgaaacgacgtttatgtgcgaatatgcagacgaaactgcgacaatcgttgaatttctcaatcgatggatcacttttagccaatctatcatcagcacgttgactggtggtggaggatcgggaggtggaggatctggaggaggaggatcgggtggaggaggatccgataaaactcatacgtgcccaccctgccccgcaccggagctgcttgggggtccttccgtattcttgtttccgccgaagccgaaggacacgcttatgattagcaggactcccgaagtgacgtgcgtcgtagtggacgtgtcgcatgaggacccggaggtcaagttcaactggtatgtcgatggcgtagaagtacacaatgcaaagactaaaccccgcgaagaacagtacggttcgacatacagagtagtgagcgtcttgactgtgctgcaccaggactggctcaacggaaaggagtataagtgtaaagtatcgaataaggcacttcccgcacctatcgagaaaacgatctccaaggctaagggtcagccaagagaaccccaagtctacactctgccccctagccgcgacgagcttacgaaaaaccaggtgtcgctcacttgtttggtgaagggtttctatccgagcgatattgcggtagagtgggaatccaacgggcagccagagaacaattacaagacgacgccaccagtgctggattcggatgggagctttttcttgtactcaaagttgaccgtggataaaagccggtggcagcagggtaatgtgttttcatgctcggtaatgcacgaggccctccataaccattatacgcagaaaagcctttcgctctcacccgggaaa

SEQ ID NO: 421 - DNA, 1140 bp, Artificial Sequence
  source: /note="Description of Artificial Sequence: Synthetic polynucleotide"
gcccctacgtcctcctcaactaaaaagacgcaacttcagcttgagcatcttcttctcgaccttcagatgattttgaacggaaccaataattacaaaaatcctaaacttactagaatgctcacgtttaagttttatatgccaaaaaaggccactgagttgaaacaccttcaatgcttggaggaggaacttaaaccacttgaggaagccttgaatcttgctccgtccaaaaactttcatttgcggccacgagatctgataagcaacatcaacgtgatcgtcctggaactgaaaggaagcgaaacgacgtttatgtgcgaatatgcagacgaaactgcgacaatcgttgaatttctcaatcgatggatcacttttagccaatctatcatcagcacgttgactggtggtggaggatcgggaggtggaggatctggaggaggaggatcgggtggaggaggatccgataaaactcatacgtgcccaccctgccccgcaccggagctgcttgggggtccttccgtattcttgtttccgccgaagccgaaggacacgcttatgattagcaggactcccgaagtgacgtgcgtcgtagtggacgtgtcgcatgaggacccggaggtcaagttcaactggtatgtcgatggcgtagaagtacacaatgcaaagactaaaccccgcgaagaacagtacggttcgacatacagagtagtgagcgtcttgactgtgctgcaccaggactggctcaacggaaaggagtataagtgtaaagtatcgaataaggcacttcccgcacctatcgagaaaacgatctccaaggctaagggtcagccaagagaaccccaagtctacactctgccccctagccgcgacgagcttacgaaaaaccaggtgtcgctcacttgtttggtgaagggtttctatccgagcgatattgcggtagagtgggaatccaacgggcagccagagaacaattacaagacgacgccaccagtgctggattcggatgggagctttttcttgtactcaaagttgaccgtggataaaagccggtggcagcagggtaatgtgttttcatgctcggtaatgcacgaggccctccataaccattatacgcagaaaagcctttcgctctcacccgggaaa

SEQ ID NO: 422 - DNA, 1140 bp, Artificial Sequence
  source: /note="Description of Artificial Sequence: Synthetic polynucleotide"
gcccctacgtcctcctcaactaaaaagacgcaacttcagcttgagcatcttcttctcgaccttcagatgattttgaacggaatcaataattacaaaaatcctaaacttactagaatgctcacgtttaagttttatatgccaaaaaaggccactgagttgaaacaccttcaatgcttggaggaggaacttaaaccacttgaggaagccttgaatcttgctccgtccaaaaactttcatttgcggccacgagttctgataagcaacatcaacgtgatcgtcctggaactgaaaggaagcgaaacgacgtttatgtgcgaatatgcagacgaaactgcgacaatcgttgaatttctcaatcgatggatcacttttagccaatctatcatcagcacgttgactggtggtggaggatcgggaggtggaggatctggaggaggaggatcgggtggaggaggatccgataaaactcatacgtgcccaccctgccccgcaccggagctgcttgggggtccttccgtattcttgtttccgccgaagccgaaggacacgcttatgattagcaggactcccgaagtgacgtgcgtcgtagtggacgtgtcgcatgaggacccggaggtcaagttcaactggtatgtcgatggcgtagaagtacacaatgcaaagactaaaccccgcgaagaacagtacggttcgacatacagagtagtgagcgtcttgactgtgctgcaccaggactggctcaacggaaaggagtataagtgtaaagtatcgaataaggcacttcccgcacctatcgagaaaacgatctccaaggctaagggtcagccaagagaaccccaagtctacactctgccccctagccgcgacgagcttacgaaaaaccaggtgtcgctcacttgtttggtgaagggtttctatccgagcgatattgcggtagagtgggaatccaacgggcagccagagaacaattacaagacgacgccaccagtgctggattcggatgggagctttttcttgtactcaaagttgaccgtggataaaagccggtggcagcagggtaatgtgttttcatgctcggtaatgcacgaggccctccataaccattatacgcagaaaagcctttcgctctcacccgggaaa

SEQ ID NO: 423 - DNA, 1140 bp, Artificial Sequence
  source: /note="Description of Artificial Sequence: Synthetic polynucleotide"
gcccctacgtcctcctcaactaaaaagacgcaacttcagcttgagcatcttcttctcgaccttcagatgattttgaacggaatcaataattacaaaaatcctaaacttactagaatgctcacgtttaagttttatatgccaaaaaaggccactgagttgaaacaccttcaatgcttggaggaggaacttaaaccacttgaggaagccttgaatcttgctccgtccaaaaactttcatttgcggccacgagatctgatacgtaacatcaacgtgatcgtcctggaactgaaaggaagcgaaacgacgtttatgtgcgaatatgcagacgaaactgcgacaatcgttgaatttctcaatcgatggatcacttttagccaatctatcatcagcacgttgactggtggtggaggatcgggaggtggaggatctggaggaggaggatcgggtggaggaggatccgataaaactcatacgtgcccaccctgccccgcaccggagctgcttgggggtccttccgtattcttgtttccgccgaagccgaaggacacgcttatgattagcaggactcccgaagtgacgtgcgtcgtagtggacgtgtcgcatgaggacccggaggtcaagttcaactggtatgtcgatggcgtagaagtacacaatgcaaagactaaaccccgcgaagaacagtacggttcgacatacagagtagtgagcgtcttgactgtgctgcaccaggactggctcaacggaaaggagtataagtgtaaagtatcgaataaggcacttcccgcacctatcgagaaaacgatctccaaggctaagggtcagccaagagaaccccaagtctacactctgccccctagccgcgacgagcttacgaaaaaccaggtgtcgctcacttgtttggtgaagggtttctatccgagcgatattgcggtagagtgggaatccaacgggcagccagagaacaattacaagacgacgccaccagtgctggattcggatgggagctttttcttgtactcaaagttgaccgtggataaaagccggtggcagcagggtaatgtgttttcatgctcggtaatgcacgaggccctccataaccattatacgcagaaaagcctttcgctctcacccgggaaa

SEQ ID NO: 424 - DNA, 1140 bp, Artificial Sequence
  source: /note="Description of Artificial Sequence: Synthetic polynucleotide"
gcccctacgtcctcctcaactaaaaagacgcaacttcagcttgagcatcttcttctcgaccttcagatgattttgaacggaatcaataattacaaaaatcctaaacttactagaatgctcacgtttaagttttatatgccaaaaaaggccactgagttgaaacaccttcaatgcttggaggaggaacttaaaccacttgaggaagccttgaatcttgctccgtccaaaaactttcatttgcggccacgagatctgataagcctgatcaacgtgatcgtcctggaactgaaaggaagcgaaacgacgtttatgtgcgaatatgcagacgaaactgcgacaatcgttgaatttctcaatcgatggatcacttttagccaatctatcatcagcacgttgactggtggtggaggatcgggaggtggaggatctggaggaggaggatcgggtggaggaggatccgataaaactcatacgtgcccaccctgccccgcaccggagctgcttgggggtccttccgtattcttgtttccgccgaagccgaaggacacgcttatgattagcaggactcccgaagtgacgtgcgtcgtagtggacgtgtcgcatgaggacccggaggtcaagttcaactggtatgtcgatggcgtagaagtacacaatgcaaagactaaaccccgcgaagaacagtacggttcgacatacagagtagtgagcgtcttgactgtgctgcaccaggactggctcaacggaaaggagtataagtgtaaagtatcgaataaggcacttcccgcacctatcgagaaaacgatctccaaggctaagggtcagccaagagaaccccaagtctacactctgccccctagccgcgacgagcttacgaaaaaccaggtgtcgctcacttgtttggtgaagggtttctatccgagcgatattgcggtagagtgggaatccaacgggcagccagagaacaattacaagacgacgccaccagtgctggattcggatgggagctttttcttgtactcaaagttgaccgtggataaaagccggtggcagcagggtaatgtgttttcatgctcggtaatgcacgaggccctccataaccattatacgcagaaaagcctttcgctctcacccgggaaa

SEQ ID NO: 425 - DNA, 1140 bp, Artificial Sequence
  source: /note="Description of Artificial Sequence: Synthetic polynucleotide"
gcccctacgtcctcctcaactaaaaagacgcaacttcagcttgagcatcttcttctcgaccttcagatgattttgaacggaatcaataattacaaaaatcctaaacttactagaatgctcacgtttaagttttatatgccaaaaaaggccactgagttgaaacaccttcaatgcttggaggaggaacttaaaccacttgaggaagccttgaatcttgctccgtccaaaaactttcatttgcggccacgagatctgataagcagcatcaacgtgatcgtcctggaactgaaaggaagcgaaacgacgtttatgtgcgaatatgcagacgaaactgcgacaatcgttgaatttctcaatcgatggatcacttttagccaatctatcatcagcacgttgactggtggtggaggatcgggaggtggaggatctggaggaggaggatcgggtggaggaggatccgataaaactcatacgtgcccaccctgccccgcaccggagctgcttgggggtccttccgtattcttgtttccgccgaagccgaaggacacgcttatgattagcaggactcccgaagtgacgtgcgtcgtagtggacgtgtcgcatgaggacccggaggtcaagttcaactggtatgtcgatggcgtagaagtacacaatgcaaagactaaaccccgcgaagaacagtacggttcgacatacagagtagtgagcgtcttgactgtgctgcaccaggactggctcaacggaaaggagtataagtgtaaagtatcgaataaggcacttcccgcacctatcgagaaaacgatctccaaggctaagggtcagccaagagaaccccaagtctacactctgccccctagccgcgacgagcttacgaaaaaccaggtgtcgctcacttgtttggtgaagggtttctatccgagcgatattgcggtagagtgggaatccaacgggcagccagagaacaattacaagacgacgccaccagtgctggattcggatgggagctttttcttgtactcaaagttgaccgtggataaaagccggtggcagcagggtaatgtgttttcatgctcggtaatgcacgaggccctccataaccattatacgcagaaaagcctttcgctctcacccgggaaa

SEQ ID NO: 426 - DNA, 1140 bp, Artificial Sequence
  source: /note="Description of Artificial Sequence: Synthetic polynucleotide"
gcccctacgtcctcctcaactaaaaagacgcaacttcagcttgagcatcttcttctcgaccttcagatgattttgaacggaatcaataattacaaaaatcctaaacttactagaatgctcacgtttaagttttatatgccaaaaaaggccactgagttgaaacaccttcaatgcttggaggaggaacttaaaccacttgaggaagccttgaatcttgctccgtccaaaaactttcatttgcggccacgagatctgataagcaacatcaacgtgagcgtcctggaactgaaaggaagcgaaacgacgtttatgtgcgaatatgcagacgaaactgcgacaatcgttgaatttctcaatcgatggatcacttttagccaatctatcatcagcacgttgactggtggtggaggatcgggaggtggaggatctggaggaggaggatcgggtggaggaggatccgataaaactcatacgtgcccaccctgccccgcaccggagctgcttgggggtccttccgtattcttgtttccgccgaagccgaaggacacgcttatgattagcaggactcccgaagtgacgtgcgtcgtagtggacgtgtcgcatgaggacccggaggtcaagttcaactggtatgtcgatggcgtagaagtacacaatgcaaagactaaaccccgcgaagaacagtacggttcgacatacagagtagtgagcgtcttgactgtgctgcaccaggactggctcaacggaaaggagtataagtgtaaagtatcgaataaggcacttcccgcacctatcgagaaaacgatctccaaggctaagggtcagccaagagaaccccaagtctacactctgccccctagccgcgacgagcttacgaaaaaccaggtgtcgctcacttgtttggtgaagggtttctatccgagcgatattgcggtagagtgggaatccaacgggcagccagagaacaattacaagacgacgccaccagtgctggattcggatgggagctttttcttgtactcaaagttgaccgtggataaaagccggtggcagcagggtaatgtgttttcatgctcggtaatgcacgaggccctccataaccattatacgcagaaaagcctttcgctctcacccgggaaa

SEQ ID NO: 427 - DNA, 1140 bp, Artificial Sequence
  source: /note="Description of Artificial Sequence: Synthetic polynucleotide"
gcccctacgtcctcctcaactaaaaagacgcaacttcagcttgagcatcttcttctcgaccttcagatgattttgaacggaatcaataattacaaaaatcctgaacttactagaatgctcacgtttaagttttatatgccaaaaaaggccactgagttgaaacaccttcaatgcttggaggaggaacttaaaccacttgaggaagccttgaatcttgctccgtccaaaaactttcatttgcggccacgagatctgataagcaacatcaacgtgatcgtcctggaactgaaaggaagcgaaacgacgtttatgtgcgaatatgcagacgaaactgcgacaatcgttgaatttctcaatcgatggatcacttttagccaatctatcatcagcacgttgactggtggtggaggatcgggaggtggaggatctggaggaggaggatcgggtggaggaggatccgataaaactcatacgtgcccaccctgccccgcaccggagctgcttgggggtccttccgtattcttgtttccgccgaagccgaaggacacgcttatgattagcaggactcccgaagtgacgtgcgtcgtagtggacgtgtcgcatgaggacccggaggtcaagttcaactggtatgtcgatggcgtagaagtacacaatgcaaagactaaaccccgcgaagaacagtacggttcgacatacagagtagtgagcgtcttgactgtgctgcaccaggactggctcaacggaaaggagtataagtgtaaagtatcgaataaggcacttcccgcacctatcgagaaaacgatctccaaggctaagggtcagccaagagaaccccaagtctacactctgccccctagccgcgacgagcttacgaaaaaccaggtgtcgctcacttgtttggtgaagggtttctatccgagcgatattgcggtagagtgggaatccaacgggcagccagagaacaattacaagacgacgccaccagtgctggattcggatgggagctttttcttgtactcaaagttgaccgtggataaaagccggtggcagcagggtaatgtgttttcatgctcggtaatgcacgaggccctccataaccattatacgcagaaaagcctttcgctctcacccgggaaa

SEQ ID NO: 428 - DNA, 1140 bp, Artificial Sequence
  source: /note="Description of Artificial Sequence: Synthetic polynucleotide"
gcccctacgtcctcctcaactaaaaagacgcaacttcagcttgagaaccttcttctcgaccttcagatgattttgaacggaatcaataattacaaaaatcctgaacttactagaatgctcacgtttaagttttatatgccaaaaaaggccactgagttgaaacaccttcaatgcttggaggaggaacttaaaccacttgaggaagccttgaatcttgctccgtccaaaaactttcatttgcggccacgagatctgataagcaacatcaacgtgatcgtcctggaactgaaaggaagcgaaacgacgtttatgtgcgaatatgcagacgaaactgcgacaatcgttgaatttctcaatcgatggatcacttttagccaatctatcatcagcacgttgactggtggtggaggatcgggaggtggaggatctggaggaggaggatcgggtggaggaggatccgataaaactcatacgtgcccaccctgccccgcaccggagctgcttgggggtccttccgtattcttgtttccgccgaagccgaaggacacgcttatgattagcaggactcccgaagtgacgtgcgtcgtagtggacgtgtcgcatgaggacccggaggtcaagttcaactggtatgtcgatggcgtagaagtacacaatgcaaagactaaaccccgcgaagaacagtacggttcgacatacagagtagtgagcgtcttgactgtgctgcaccaggactggctcaacggaaaggagtataagtgtaaagtatcgaataaggcacttcccgcacctatcgagaaaacgatctccaaggctaagggtcagccaagagaaccccaagtctacactctgccccctagccgcgacgagcttacgaaaaaccaggtgtcgctcacttgtttggtgaagggtttctatccgagcgatattgcggtagagtgggaatccaacgggcagccagagaacaattacaagacgacgccaccagtgctggattcggatgggagctttttcttgtactcaaagttgaccgtggataaaagccggtggcagcagggtaatgtgttttcatgctcggtaatgcacgaggccctccataaccattatacgcagaaaagcctttcgctctcacccgggaaa

SEQ ID NO: 429 - DNA, 1140 bp, Artificial Sequence
  source: /note="Description of Artificial Sequence: Synthetic polynucleotide"
gcccctacgtcctcctcaactaaaaagacgcaacttcagcttgagctgcttcttctcgaccttcagatgattttgaacggaatcaataattacaaaaatcctgaacttactagaatgctcacgtttaagttttatatgccaaaaaaggccactgagttgaaacaccttcaatgcttggaggaggaacttaaaccacttgaggaagccttgaatcttgctccgtccaaaaactttcatttgcggccacgagatctgataagcaacatcaacgtgatcgtcctggaactgaaaggaagcgaaacgacgtttatgtgcgaatatgcagacgaaactgcgacaatcgttgaatttctcaatcgatggatcacttttagccaatctatcatcagcacgttgactggtggtggaggatcgggaggtggaggatctggaggaggaggatcgggtggaggaggatccgataaaactcatacgtgcccaccctgccccgcaccggagctgcttgggggtccttccgtattcttgtttccgccgaagccgaaggacacgcttatgattagcaggactcccgaagtgacgtgcgtcgtagtggacgtgtcgcatgaggacccggaggtcaagttcaactggtatgtcgatggcgtagaagtacacaatgcaaagactaaaccccgcgaagaacagtacggttcgacatacagagtagtgagcgtcttgactgtgctgcaccaggactggctcaacggaaaggagtataagtgtaaagtatcgaataaggcacttcccgcacctatcgagaaaacgatctccaaggctaagggtcagccaagagaaccccaagtctacactctgccccctagccgcgacgagcttacgaaaaaccaggtgtcgctcacttgtttggtgaagggtttctatccgagcgatattgcggtagagtgggaatccaacgggcagccagagaacaattacaagacgacgccaccagtgctggattcggatgggagctttttcttgtactcaaagttgaccgtggataaaagccggtggcagcagggtaatgtgttttcatgctcggtaatgcacgaggccctccataaccattatacgcagaaaagcctttcgctctcacccgggaaa

SEQ ID NO: 430 - DNA, 1140 bp, Artificial Sequence
  source: /note="Description of Artificial Sequence: Synthetic polynucleotide"
gcccctacgtcctcctcaactaaaaagacgcaacttcagcttgagcatcttcttctcgaccttcagatgattttgaacggaatcaataattacaaaaatcctgaacttactagaatgctcacgtttaagttttatatgccaaaaaaggccactgagttgaaacaccttcaatgcttggaggaggaacttaaaccacttgaggaagccttgaatcttgctccgtccaaaaactttcatttgcggccacgagtgctgataagcaacatcaacgtgatcgtcctggaactgaaaggaagcgaaacgacgtttatgtgcgaatatgcagacgaaactgcgacaatcgttgaatttctcaatcgatggatcacttttagccaatctatcatcagcacgttgactggtggtggaggatcgggaggtggaggatctggaggaggaggatcgggtggaggaggatccgataaaactcatacgtgcccaccctgccccgcaccggagctgcttgggggtccttccgtattcttgtttccgccgaagccgaaggacacgcttatgattagcaggactcccgaagtgacgtgcgtcgtagtggacgtgtcgcatgaggacccggaggtcaagttcaactggtatgtcgatggcgtagaagtacacaatgcaaagactaaaccccgcgaagaacagtacggttcgacatacagagtagtgagcgtcttgactgtgctgcaccaggactggctcaacggaaaggagtataagtgtaaagtatcgaataaggcacttcccgcacctatcgagaaaacgatctccaaggctaagggtcagccaagagaaccccaagtctacactctgccccctagccgcgacgagcttacgaaaaaccaggtgtcgctcacttgtttggtgaagggtttctatccgagcgatattgcggtagagtgggaatccaacgggcagccagagaacaattacaagacgacgccaccagtgctggattcggatgggagctttttcttgtactcaaagttgaccgtggataaaagccggtggcagcagggtaatgtgttttcatgctcggtaatgcacgaggccctccataaccattatacgcagaaaagcctttcgctctcacccgggaaa

SEQ ID NO: 431 - DNA, 1140 bp, Artificial Sequence
  source: /note="Description of Artificial Sequence: Synthetic polynucleotide"
gcccctacgtcctcctcaactaaaaagacgcaacttcagcttgagcatcttcttctcgaccttcagatgattttgaacggaatcaataattacaaaaatcctgaacttactagaatgctcacgtttaagttttatatgccaaaaaaggccactgagttgaaacaccttcaatgcttggaggaggaacttaaaccacttgaggaagccttgaatcttgctccgtccaaaaactttcatttgcggccacgagatctgataagcaacatcaacgtgagcgtcctggaactgaaaggaagcgaaacgacgtttatgtgcgaatatgcagacgaaactgcgacaatcgttgaatttctcaatcgatggatcacttttagccaatctatcatcagcacgttgactggtggtggaggatcgggaggtggaggatctggaggaggaggatcgggtggaggaggatccgataaaactcatacgtgcccaccctgccccgcaccggagctgcttgggggtccttccgtattcttgtttccgccgaagccgaaggacacgcttatgattagcaggactcccgaagtgacgtgcgtcgtagtggacgtgtcgcatgaggacccggaggtcaagttcaactggtatgtcgatggcgtagaagtacacaatgcaaagactaaaccccgcgaagaacagtacggttcgacatacagagtagtgagcgtcttgactgtgctgcaccaggactggctcaacggaaaggagtataagtgtaaagtatcgaataaggcacttcccgcacctatcgagaaaacgatctccaaggctaagggtcagccaagagaaccccaagtctacactctgccccctagccgcgacgagcttacgaaaaaccaggtgtcgctcacttgtttggtgaagggtttctatccgagcgatattgcggtagagtgggaatccaacgggcagccagagaacaattacaagacgacgccaccagtgctggattcggatgggagctttttcttgtactcaaagttgaccgtggataaaagccggtggcagcagggtaatgtgttttcatgctcggtaatgcacgaggccctccataaccattatacgcagaaaagcctttcgctctcacccgggaaa

SEQ ID NO: 432 - DNA, 1140 bp, Artificial Sequence
  source: /note="Description of Artificial Sequence: Synthetic polynucleotide"
gcccctacgtcctcctcaactaaaaagacgcaacttcagcttgagcatcttcttctcgaccttcagatgattttgaacggaatcaataattacaaaaatcctaaacttactcagatgctcacgtttaagttttatatgccaaaaaaggccactgagttgaaacaccttcaatgcttggaggaggaacttaaaccacttgaggaagccttgaatcttgctccgtccaaaaactttcatttgcggccacgagatctgataagcaacatcaacgtgatcgtcctggaactgaaaggaagcgaaacgacgtttatgtgcgaatatgcagacgaaactgcgacaatcgttgaatttctcaatcgatggatcacttttagccaatctatcatcagcacgttgactggtggtggaggatcgggaggtggaggatctggaggaggaggatcgggtggaggaggatccgataaaactcatacgtgcccaccctgccccgcaccggagctgcttgggggtccttccgtattcttgtttccgccgaagccgaaggacacgcttatgattagcaggactcccgaagtgacgtgcgtcgtagtggacgtgtcgcatgaggacccggaggtcaagttcaactggtatgtcgatggcgtagaagtacacaatgcaaagactaaaccccgcgaagaacagtacggttcgacatacagagtagtgagcgtcttgactgtgctgcaccaggactggctcaacggaaaggagtataagtgtaaagtatcgaataaggcacttcccgcacctatcgagaaaacgatctccaaggctaagggtcagccaagagaaccccaagtctacactctgccccctagccgcgacgagcttacgaaaaaccaggtgtcgctcacttgtttggtgaagggtttctatccgagcgatattgcggtagagtgggaatccaacgggcagccagagaacaattacaagacgacgccaccagtgctggattcggatgggagctttttcttgtactcaaagttgaccgtggataaaagccggtggcagcagggtaatgtgttttcatgctcggtaatgcacgaggccctccataaccattatacgcagaaaagcctttcgctctcacccgggaaa

SEQ ID NO: 433 - DNA, 1140 bp, Artificial Sequence
  source: /note="Description of Artificial Sequence: Synthetic polynucleotide"
gcccctacgtcctcctcaactaaaaagacgcaacttcagcttgagaaccttcttctcgaccttcagatgattttgaacggaatcaataattacaaaaatcctaaacttactcagatgctcacgtttaagttttatatgccaaaaaaggccactgagttgaaacaccttcaatgcttggaggaggaacttaaaccacttgaggaagccttgaatcttgctccgtccaaaaactttcatttgcggccacgagatctgataagcaacatcaacgtgatcgtcctggaactgaaaggaagcgaaacgacgtttatgtgcgaatatgcagacgaaactgcgacaatcgttgaatttctcaatcgatggatcacttttagccaatctatcatcagcacgttgactggtggtggaggatcgggaggtggaggatctggaggaggaggatcgggtggaggaggatccgataaaactcatacgtgcccaccctgccccgcaccggagctgcttgggggtccttccgtattcttgtttccgccgaagccgaaggacacgcttatgattagcaggactcccgaagtgacgtgcgtcgtagtggacgtgtcgcatgaggacccggaggtcaagttcaactggtatgtcgatggcgtagaagtacacaatgcaaagactaaaccccgcgaagaacagtacggttcgacatacagagtagtgagcgtcttgactgtgctgcaccaggactggctcaacggaaaggagtataagtgtaaagtatcgaataaggcacttcccgcacctatcgagaaaacgatctccaaggctaagggtcagccaagagaaccccaagtctacactctgccccctagccgcgacgagcttacgaaaaaccaggtgtcgctcacttgtttggtgaagggtttctatccgagcgatattgcggtagagtgggaatccaacgggcagccagagaacaattacaagacgacgccaccagtgctggattcggatgggagctttttcttgtactcaaagttgaccgtggataaaagccggtggcagcagggtaatgtgttttcatgctcggtaatgcacgaggccctccataaccattatacgcagaaaagcctttcgctctcacccgggaaa

SEQ ID NO: 434 - DNA, 1140 bp, Artificial Sequence
  source: /note="Description of Artificial Sequence: Synthetic polynucleotide"
gcccctacgtcctcctcaactaaaaagacgcaacttcagcttgagctgcttcttctcgaccttcagatgattttgaacggaatcaataattacaaaaatcctaaacttactcagatgctcacgtttaagttttatatgccaaaaaaggccactgagttgaaacaccttcaatgcttggaggaggaacttaaaccacttgaggaagccttgaatcttgctccgtccaaaaactttcatttgcggccacgagatctgataagcaacatcaacgtgatcgtcctggaactgaaaggaagcgaaacgacgtttatgtgcgaatatgcagacgaaactgcgacaatcgttgaatttctcaatcgatggatcacttttagccaatctatcatcagcacgttgactggtggtggaggatcgggaggtggaggatctggaggaggaggatcgggtggaggaggatccgataaaactcatacgtgcccaccctgccccgcaccggagctgcttgggggtccttccgtattcttgtttccgccgaagccgaaggacacgcttatgattagcaggactcccgaagtgacgtgcgtcgtagtggacgtgtcgcatgaggacccggaggtcaagttcaactggtatgtcgatggcgtagaagtacacaatgcaaagactaaaccccgcgaagaacagtacggttcgacatacagagtagtgagcgtcttgactgtgctgcaccaggactggctcaacggaaaggagtataagtgtaaagtatcgaataaggcacttcccgcacctatcgagaaaacgatctccaaggctaagggtcagccaagagaaccccaagtctacactctgccccctagccgcgacgagcttacgaaaaaccaggtgtcgctcacttgtttggtgaagggtttctatccgagcgatattgcggtagagtgggaatccaacgggcagccagagaacaattacaagacgacgccaccagtgctggattcggatgggagctttttcttgtactcaaagttgaccgtggataaaagccggtggcagcagggtaatgtgttttcatgctcggtaatgcacgaggccctccataaccattatacgcagaaaagcctttcgctctcacccgggaaa

SEQ ID NO: 435 - DNA, 1140 bp, Artificial Sequence
  source: /note="Description of Artificial Sequence: Synthetic polynucleotide"
gcccctacgtcctcctcaactaaaaagacgcaacttcagcttgagcatcttcttctcgaccttcagatgattttgaacggaatcaataattacaaaaatcctaaacttactcagatgctcacgtttaagttttatatgccaaaaaaggccactgagttgaaacaccttcaatgcttggaggaggaacttaaaccacttgaggaagccttgaatcttgctccgtccaaaaactttcatttgcggccacgagtgctgataagcaacatcaacgtgatcgtcctggaactgaaaggaagcgaaacgacgtttatgtgcgaatatgcagacgaaactgcgacaatcgttgaatttctcaatcgatggatcacttttagccaatctatcatcagcacgttgactggtggtggaggatcgggaggtggaggatctggaggaggaggatcgggtggaggaggatccgataaaactcatacgtgcccaccctgccccgcaccggagctgcttgggggtccttccgtattcttgtttccgccgaagccgaaggacacgcttatgattagcaggactcccgaagtgacgtgcgtcgtagtggacgtgtcgcatgaggacccggaggtcaagttcaactggtatgtcgatggcgtagaagtacacaatgcaaagactaaaccccgcgaagaacagtacggttcgacatacagagtagtgagcgtcttgactgtgctgcaccaggactggctcaacggaaaggagtataagtgtaaagtatcgaataaggcacttcccgcacctatcgagaaaacgatctccaaggctaagggtcagccaagagaaccccaagtctacactctgccccctagccgcgacgagcttacgaaaaaccaggtgtcgctcacttgtttggtgaagggtttctatccgagcgatattgcggtagagtgggaatccaacgggcagccagagaacaattacaagacgacgccaccagtgctggattcggatgggagctttttcttgtactcaaagttgaccgtggataaaagccggtggcagcagggtaatgtgttttcatgctcggtaatgcacgaggccctccataaccattatacgcagaaaagcctttcgctctcacccgggaaa

SEQ ID NO: 436 - DNA, 1140 bp, Artificial Sequence
  source: /note="Description of Artificial Sequence: Synthetic polynucleotide"
gcccctacgtcctcctcaactaaaaagacgcaacttcagcttgagcatcttcttctcgaccttcagatgattttgaacggaatcaataattacaaaaatcctaaacttactcagatgctcacgtttaagttttatatgccaaaaaaggccactgagttgaaacaccttcaatgcttggaggaggaacttaaaccacttgaggaagccttgaatcttgctccgtccaaaaactttcatttgcggccacgagatctgataagcaacatcaacgtgagcgtcctggaactgaaaggaagcgaaacgacgtttatgtgcgaatatgcagacgaaactgcgacaatcgttgaatttctcaatcgatggatcacttttagccaatctatcatcagcacgttgactggtggtggaggatcgggaggtggaggatctggaggaggaggatcgggtggaggaggatccgataaaactcatacgtgcccaccctgccccgcaccggagctgcttgggggtccttccgtattcttgtttccgccgaagccgaaggacacgcttatgattagcaggactcccgaagtgacgtgcgtcgtagtggacgtgtcgcatgaggacccggaggtcaagttcaactggtatgtcgatggcgtagaagtacacaatgcaaagactaaaccccgcgaagaacagtacggttcgacatacagagtagtgagcgtcttgactgtgctgcaccaggactggctcaacggaaaggagtataagtgtaaagtatcgaataaggcacttcccgcacctatcgagaaaacgatctccaaggctaagggtcagccaagagaaccccaagtctacactctgccccctagccgcgacgagcttacgaaaaaccaggtgtcgctcacttgtttggtgaagggtttctatccgagcgatattgcggtagagtgggaatccaacgggcagccagagaacaattacaagacgacgccaccagtgctggattcggatgggagctttttcttgtactcaaagttgaccgtggataaaagccggtggcagcagggtaatgtgttttcatgctcggtaatgcacgaggccctccataaccattatacgcagaaaagcctttcgctctcacccgggaaa

SEQ ID NO: 437 - DNA, 1140 bp, Artificial Sequence
  source: /note="Description of Artificial Sequence: Synthetic polynucleotide"
gcccctacgtcctcctcaactaaaaagacgcaacttcagcttgagcatcttcttctcgaccttcagatgattttgaacggaatcaataattacaaaaatcctaaacttactaacatgctcacgtttaagttttatatgccaaaaaaggccactgagttgaaacaccttcaatgcttggaggaggaacttaaaccacttgaggaagccttgaatcttgctccgtccaaaaactttcatttgcggccacgagatctgataagcaacatcaacgtgatcgtcctggaactgaaaggaagcgaaacgacgtttatgtgcgaatatgcagacgaaactgcgacaatcgttgaatttctcaatcgatggatcacttttagccaatctatcatcagcacgttgactggtggtggaggatcgggaggtggaggatctggaggaggaggatcgggtggaggaggatccgataaaactcatacgtgcccaccctgccccgcaccggagctgcttgggggtccttccgtattcttgtttccgccgaagccgaaggacacgcttatgattagcaggactcccgaagtgacgtgcgtcgtagtggacgtgtcgcatgaggacccggaggtcaagttcaactggtatgtcgatggcgtagaagtacacaatgcaaagactaaaccccgcgaagaacagtacggttcgacatacagagtagtgagcgtcttgactgtgctgcaccaggactggctcaacggaaaggagtataagtgtaaagtatcgaataaggcacttcccgcacctatcgagaaaacgatctccaaggctaagggtcagccaagagaaccccaagtctacactctgccccctagccgcgacgagcttacgaaaaaccaggtgtcgctcacttgtttggtgaagggtttctatccgagcgatattgcggtagagtgggaatccaacgggcagccagagaacaattacaagacgacgccaccagtgctggattcggatgggagctttttcttgtactcaaagttgaccgtggataaaagccggtggcagcagggtaatgtgttttcatgctcggtaatgcacgaggccctccataaccattatacgcagaaaagcctttcgctctcacccgggaaa

SEQ ID NO: 438 - DNA, 1140 bp, Artificial Sequence
  source: /note="Description of Artificial Sequence: Synthetic polynucleotide"
gcccctacgtcctcctcaactaaaaagacgcaacttcagcttgagaaccttcttctcgaccttcagatgattttgaacggaatcaataattacaaaaatcctaaacttactaacatgctcacgtttaagttttatatgccaaaaaaggccactgagttgaaacaccttcaatgcttggaggaggaacttaaaccacttgaggaagccttgaatcttgctccgtccaaaaactttcatttgcggccacgagatctgataagcaacatcaacgtgatcgtcctggaactgaaaggaagcgaaacgacgtttatgtgcgaatatgcagacgaaactgcgacaatcgttgaatttctcaatcgatggatcacttttagccaatctatcatcagcacgttgactggtggtggaggatcgggaggtggaggatctggaggaggaggatcgggtggaggaggatccgataaaactcatacgtgcccaccctgccccgcaccggagctgcttgggggtccttccgtattcttgtttccgccgaagccgaaggacacgcttatgattagcaggactcccgaagtgacgtgcgtcgtagtggacgtgtcgcatgaggacccggaggtcaagttcaactggtatgtcgatggcgtagaagtacacaatgcaaagactaaaccccgcgaagaacagtacggttcgacatacagagtagtgagcgtcttgactgtgctgcaccaggactggctcaacggaaaggagtataagtgtaaagtatcgaataaggcacttcccgcacctatcgagaaaacgatctccaaggctaagggtcagccaagagaaccccaagtctacactctgccccctagccgcgacgagcttacgaaaaaccaggtgtcgctcacttgtttggtgaagggtttctatccgagcgatattgcggtagagtgggaatccaacgggcagccagagaacaattacaagacgacgccaccagtgctggattcggatgggagctttttcttgtactcaaagttgaccgtggataaaagccggtggcagcagggtaatgtgttttcatgctcggtaatgcacgaggccctccataaccattatacgcagaaaagcctttcgctctcacccgggaaa

SEQ ID NO: 439 - DNA, 1140 bp, Artificial Sequence
  source: /note="Description of Artificial Sequence: Synthetic polynucleotide"
gcccctacgtcctcctcaactaaaaagacgcaacttcagcttgagttgcttcttctcgaccttcagatgattttgaacggaatcaataattacaaaaatcctaaacttactaacatgctcacgtttaagttttatatgccaaaaaaggccactgagttgaaacaccttcaatgcttggaggaggaacttaaaccacttgaggaagccttgaatcttgctccgtccaaaaactttcatttgcggccacgagatctgataagcaacatcaacgtgatcgtcctggaactgaaaggaagcgaaacgacgtttatgtgcgaatatgcagacgaaactgcgacaatcgttgaatttctcaatcgatggatcacttttagccaatctatcatcagcacgttgactggtggtggaggatcgggaggtggaggatctggaggaggaggatcgggtggaggaggatccgataaaactcatacgtgcccaccctgccccgcaccggagctgcttgggggtccttccgtattcttgtttccgccgaagccgaaggacacgcttatgattagcaggactcccgaagtgacgtgcgtcgtagtggacgtgtcgcatgaggacccggaggtcaagttcaactggtatgtcgatggcgtagaagtacacaatgcaaagactaaaccccgcgaagaacagtacggttcgacatacagagtagtgagcgtcttgactgtgctgcaccaggactggctcaacggaaaggagtataagtgtaaagtatcgaataaggcacttcccgcacctatcgagaaaacgatctccaaggctaagggtcagccaagagaaccccaagtctacactctgccccctagccgcgacgagcttacgaaaaaccaggtgtcgctcacttgtttggtgaagggtttctatccgagcgatattgcggtagagtgggaatccaacgggcagccagagaacaattacaagacgacgccaccagtgctggattcggatgggagctttttcttgtactcaaagttgaccgtggataaaagccggtggcagcagggtaatgtgttttcatgctcggtaatgcacgaggccctccataaccattatacgcagaaaagcctttcgctctcacccgggaaa

SEQ ID NO: 440 - DNA, 1140 bp, Artificial Sequence
  source: /note="Description of Artificial Sequence: Synthetic polynucleotide"
gcccctacgtcctcctcaactaaaaagacgcaacttcagcttgagcatcttcttctcgaccttcagatgattttgaacggaatcaataattacaaaaatcctaaacttactaacatgctcacgtttaagttttatatgccaaaaaaggccactgagttgaaacaccttcaatgcttggaggaggaacttaaaccacttgaggaagccttgaatcttgctccgtccaaaaactttcatttgcggccacgagtcctgataagcaacatcaacgtgatcgtcctggaactgaaaggaagcgaaacgacgtttatgtgcgaatatgcagacgaaactgcgacaatcgttgaatttctcaatcgatggatcacttttagccaatctatcatcagcacgttgactggtggtggaggatcgggaggtggaggatctggaggaggaggatcgggtggaggaggatccgataaaactcatacgtgcccaccctgccccgcaccggagctgcttgggggtccttccgtattcttgtttccgccgaagccgaaggacacgcttatgattagcaggactcccgaagtgacgtgcgtcgtagtggacgtgtcgcatgaggacccggaggtcaagttcaactggtatgtcgatggcgtagaagtacacaatgcaaagactaaaccccgcgaagaacagtacggttcgacatacagagtagtgagcgtcttgactgtgctgcaccaggactggctcaacggaaaggagtataagtgtaaagtatcgaataaggcacttcccgcacctatcgagaaaacgatctccaaggctaagggtcagccaagagaaccccaagtctacactctgccccctagccgcgacgagcttacgaaaaaccaggtgtcgctcacttgtttggtgaagggtttctatccgagcgatattgcggtagagtgggaatccaacgggcagccagagaacaattacaagacgacgccaccagtgctggattcggatgggagctttttcttgtactcaaagttgaccgtggataaaagccggtggcagcagggtaatgtgttttcatgctcggtaatgcacgaggccctccataaccattatacgcagaaaagcctttcgctctcacccgggaaa

SEQ ID NO: 441 - DNA, 1140 bp, Artificial Sequence
  source: /note="Description of Artificial Sequence: Synthetic polynucleotide"
gcccctacgtcctcctcaactaaaaagacgcaacttcagcttgagcatcttcttctcgaccttcagatgattttgaacggaatcaataattacaaaaatcctaaacttactaacatgctcacgtttaagttttatatgccaaaaaaggccactgagttgaaacaccttcaatgcttggaggaggaacttaaaccacttgaggaagccttgaatcttgctccgtccaaaaactttcatttgcggccacgagatctgataagcaacatcaacgtgagcgtcctggaactgaaaggaagcgaaacgacgtttatgtgcgaatatgcagacgaaactgcgacaatcgttgaatttctcaatcgatggatcacttttagccaatctatcatcagcacgttgactggtggtggaggatcgggaggtggaggatctggaggaggaggatcgggtggaggaggatccgataaaactcatacgtgcccaccctgccccgcaccggagctgcttgggggtccttccgtattcttgtttccgccgaagccgaaggacacgcttatgattagcaggactcccgaagtgacgtgcgtcgtagtggacgtgtcgcatgaggacccggaggtcaagttcaactggtatgtcgatggcgtagaagtacacaatgcaaagactaaaccccgcgaagaacagtacggttcgacatacagagtagtgagcgtcttgactgtgctgcaccaggactggctcaacggaaaggagtataagtgtaaagtatcgaataaggcacttcccgcacctatcgagaaaacgatctccaaggctaagggtcagccaagagaaccccaagtctacactctgccccctagccgcgacgagcttacgaaaaaccaggtgtcgctcacttgtttggtgaagggtttctatccgagcgatattgcggtagagtgggaatccaacgggcagccagagaacaattacaagacgacgccaccagtgctggattcggatgggagctttttcttgtactcaaagttgaccgtggataaaagccggtggcagcagggtaatgtgttttcatgctcggtaatgcacgaggccctccataaccattatacgcagaaaagcctttcgctctcacccgggaaa

SEQ ID NO: 442 - DNA, 1140 bp, Artificial Sequence
  source: /note="Description of Artificial Sequence: Synthetic polynucleotide"
gcccctacgtcctcctcaactaaaaagacgcaacttcagcttgagcatcttcttctcgaccttcagatgattttgaacggaatcaataattacaaaaatcctaaacttactgaaatgctcacgtttaagttttatatgccaaaaaaggccactgagttgaaacaccttcaatgcttggaggaggaacttaaaccacttgaggaagccttgaatcttgctccgtccaaaaactttcatttgcggccacgagatctgataagcaacatcaacgtgatcgtcctggaactgaaaggaagcgaaacgacgtttatgtgcgaatatgcagacgaaactgcgacaatcgttgaatttctcaatcgatggatcacttttagccaatctatcatcagcacgttgactggtggtggaggatcgggaggtggaggatctggaggaggaggatcgggtggaggaggatccgataaaactcatacgtgcccaccctgccccgcaccggagctgcttgggggtccttccgtattcttgtttccgccgaagccgaaggacacgcttatgattagcaggactcccgaagtgacgtgcgtcgtagtggacgtgtcgcatgaggacccggaggtcaagttcaactggtatgtcgatggcgtagaagtacacaatgcaaagactaaaccccgcgaagaacagtacggttcgacatacagagtagtgagcgtcttgactgtgctgcaccaggactggctcaacggaaaggagtataagtgtaaagtatcgaataaggcacttcccgcacctatcgagaaaacgatctccaaggctaagggtcagccaagagaaccccaagtctacactctgccccctagccgcgacgagcttacgaaaaaccaggtgtcgctcacttgtttggtgaagggtttctatccgagcgatattgcggtagagtgggaatccaacgggcagccagagaacaattacaagacgacgccaccagtgctggattcggatgggagctttttcttgtactcaaagttgaccgtggataaaagccggtggcagcagggtaatgtgttttcatgctcggtaatgcacgaggccctccataaccattatacgcagaaaagcctttcgctctcacccgggaaa

SEQ ID NO: 443 - DNA, 1140 bp, Artificial Sequence
  source: /note="Description of Artificial Sequence: Synthetic polynucleotide"
gcccctacgtcctcctcaactaaaaagacgcaacttcagcttgagcatcttcttctcgaccttcagatgattttgaacggaatcaataattacaaaaatcctaaacttactagaatgctcacgaagaagttttatatgccaaaaaaggccactgagttgaaacaccttcaatgcttggaggaggaacttaaaccacttgaggaagccttgaatcttgctccgtccaaaaactttcatttgcggccacgagatctgataagcaacatcaacgtgatcgtcctggaactgaaaggaagcgaaacgacgtttatgtgcgaatatgcagacgaaactgcgacaatcgttgaatttctcaatcgatggatcacttttagccaatctatcatcagcacgttgactggtggtggaggatcgggaggtggaggatctggaggaggaggatcgggtggaggaggatccgataaaactcatacgtgcccaccctgccccgcaccggagctgcttgggggtccttccgtattcttgtttccgccgaagccgaaggacacgcttatgattagcaggactcccgaagtgacgtgcgtcgtagtggacgtgtcgcatgaggacccggaggtcaagttcaactggtatgtcgatggcgtagaagtacacaatgcaaagactaaaccccgcgaagaacagtacggttcgacatacagagtagtgagcgtcttgactgtgctgcaccaggactggctcaacggaaaggagtataagtgtaaagtatcgaataaggcacttcccgcacctatcgagaaaacgatctccaaggctaagggtcagccaagagaaccccaagtctacactctgccccctagccgcgacgagcttacgaaaaaccaggtgtcgctcacttgtttggtgaagggtttctatccgagcgatattgcggtagagtgggaatccaacgggcagccagagaacaattacaagacgacgccaccagtgctggattcggatgggagctttttcttgtactcaaagttgaccgtggataaaagccggtggcagcagggtaatgtgttttcatgctcggtaatgcacgaggccctccataaccattatacgcagaaaagcctttcgctctcacccgggaaa

SEQ ID NO: 444 - DNA, 1140 bp, Artificial Sequence
  source: /note="Description of Artificial Sequence: Synthetic polynucleotide"
gcccctacgtcctcctcaactaaaaagacgcaacttcagcttgagcatcttcttctcgaccttcagatgattttgaacggaatcaataattacaaaaatcctaaacttactagaatgctcacgcagaagttttatatgccaaaaaaggccactgagttgaaacaccttcaatgcttggaggaggaacttaaaccacttgaggaagccttgaatcttgctccgtccaaaaactttcatttgcggccacgagatctgataagcaacatcaacgtgatcgtcctggaactgaaaggaagcgaaacgacgtttatgtgcgaatatgcagacgaaactgcgacaatcgttgaatttctcaatcgatggatcacttttagccaatctatcatcagcacgttgactggtggtggaggatcgggaggtggaggatctggaggaggaggatcgggtggaggaggatccgataaaactcatacgtgcccaccctgccccgcaccggagctgcttgggggtccttccgtattcttgtttccgccgaagccgaaggacacgcttatgattagcaggactcccgaagtgacgtgcgtcgtagtggacgtgtcgcatgaggacccggaggtcaagttcaactggtatgtcgatggcgtagaagtacacaatgcaaagactaaaccccgcgaagaacagtacggttcgacatacagagtagtgagcgtcttgactgtgctgcaccaggactggctcaacggaaaggagtataagtgtaaagtatcgaataaggcacttcccgcacctatcgagaaaacgatctccaaggctaagggtcagccaagagaaccccaagtctacactctgccccctagccgcgacgagcttacgaaaaaccaggtgtcgctcacttgtttggtgaagggtttctatccgagcgatattgcggtagagtgggaatccaacgggcagccagagaacaattacaagacgacgccaccagtgctggattcggatgggagctttttcttgtactcaaagttgaccgtggataaaagccggtggcagcagggtaatgtgttttcatgctcggtaatgcacgaggccctccataaccattatacgcagaaaagcctttcgctctcacccgggaaa

SEQ ID NO: 445 - DNA, 1140 bp, Artificial Sequence
  source: /note="Description of Artificial Sequence: Synthetic polynucleotide"
gcccctacgtcctcctcaactaaaaagacgcaacttcagcttgagcatcttcttctcgaccttcagatgattttgaacggaatcaataattacaaaaatcctaaacttactagaatgctcacggcaaagtttgctatgccaaaaaaggccactgagttgaaacaccttcaatgcttggaggaggaacttaaaccacttgaggaagccttgaatggtgctccgtccaaaaactttcatttgcggccacgagatctgataagcgatatcaacgtgatcgtcctggaactgaaaggaagcgaaacgacgtttatgtgcgaatatgcagacgaaactgcgacaatcgttgaatttctcaatcgatggatcacttttagccaatctatcatcagcacgttgactggtggtggaggatcgggaggtggaggatctggaggaggaggatcgggtggaggaggatccgataaaactcatacgtgcccaccctgccccgcaccggagctgcttgggggtccttccgtattcttgtttccgccgaagccgaaggacacgcttatgattagcaggactcccgaagtgacgtgcgtcgtagtggacgtgtcgcatgaggacccggaggtcaagttcaactggtatgtcgatggcgtagaagtacacaatgcaaagactaaaccccgcgaagaacagtacggttcgacatacagagtagtgagcgtcttgactgtgctgcaccaggactggctcaacggaaaggagtataagtgtaaagtatcgaataaggcacttcccgcacctatcgagaaaacgatctccaaggctaagggtcagccaagagaaccccaagtctacactctgccccctagccgcgacgagcttacgaaaaaccaggtgtcgctcacttgtttggtgaagggtttctatccgagcgatattgcggtagagtgggaatccaacgggcagccagagaacaattacaagacgacgccaccagtgctggattcggatgggagctttttcttgtactcaaagttgaccgtggataaaagccggtggcagcagggtaatgtgttttcatgctcggtaatgcacgaggccctccataaccattatacgcagaaaagcctttcgctctcacccgggaaa

SEQ ID NO: 446 - DNA, 1140 bp, Artificial Sequence
  source: /note="Description of Artificial Sequence: Synthetic polynucleotide"
gcccctacgtcctcctcaactaaaaagacgcaacttcagcttgagcatcttcttctcgaccttcagatgattttgaacggaatcaataattacaaaaatcctaaacttactaacatgctcacgtttaagttttatatgccaaaaaaggccactgagttgaaacaccttcaatgcttggaggaggaacttaaaccacttgaggaagccttgaatcttgctccgtccaaaaactttcatttgcggccacgagatctgataaggaacatcaacgtgatcgtcctggaactgaaaggaagcgaaacgacgtttatgtgcgaatatgcagacgaaactgcgacaatcgttgaatttctcaatcgatggatcacttttagccaatctatcatcagcacgttgactggtggtggaggatcgggaggtggaggatctggaggaggaggatcgggtggaggaggatccgataaaactcatacgtgcccaccctgccccgcaccggagctgcttgggggtccttccgtattcttgtttccgccgaagccgaaggacacgcttatgattagcaggactcccgaagtgacgtgcgtcgtagtggacgtgtcgcatgaggacccggaggtcaagttcaactggtatgtcgatggcgtagaagtacacaatgcaaagactaaaccccgcgaagaacagtacggttcgacatacagagtagtgagcgtcttgactgtgctgcaccaggactggctcaacggaaaggagtataagtgtaaagtatcgaataaggcacttcccgcacctatcgagaaaacgatctccaaggctaagggtcagccaagagaaccccaagtctacactctgccccctagccgcgacgagcttacgaaaaaccaggtgtcgctcacttgtttggtgaagggtttctatccgagcgatattgcggtagagtgggaatccaacgggcagccagagaacaattacaagacgacgccaccagtgctggattcggatgggagctttttcttgtactcaaagttgaccgtggataaaagccggtggcagcagggtaatgtgttttcatgctcggtaatgcacgaggccctccataaccattatacgcagaaaagcctttcgctctcacccgggaaa

SEQ ID NO: 447 - DNA, 1140 bp, Artificial Sequence
  source: /note="Description of Artificial Sequence: Synthetic polynucleotide"
gcccctacgtcctcctcaactaaaaagacgcaacttcagcttgagaaccttcttctcgaccttcagatgattttgaacggaatcaataattacaaaaatcctaaacttactgaaatgctcacgtttaagttttatatgccaaaaaaggccactgagttgaaacaccttcaatgcttggaggaggaacttaaaccacttgaggaagccttgaatcttgctccgtccaaaaactttcatttgcggccacgagatctgataagcaacatcaacgtgatcgtcctggaactgaaaggaagcgaaacgacgtttatgtgcgaatatgcagacgaaactgcgacaatcgttgaatttctcaatcgatggatcacttttagccaatctatcatcagcacgttgactggtggtggaggatcgggaggtggaggatctggaggaggaggatcgggtggaggaggatccgataaaactcatacgtgcccaccctgccccgcaccggagctgcttgggggtccttccgtattcttgtttccgccgaagccgaaggacacgcttatgattagcaggactcccgaagtgacgtgcgtcgtagtggacgtgtcgcatgaggacccggaggtcaagttcaactggtatgtcgatggcgtagaagtacacaatgcaaagactaaaccccgcgaagaacagtacggttcgacatacagagtagtgagcgtcttgactgtgctgcaccaggactggctcaacggaaaggagtataagtgtaaagtatcgaataaggcacttcccgcacctatcgagaaaacgatctccaaggctaagggtcagccaagagaaccccaagtctacactctgccccctagccgcgacgagcttacgaaaaaccaggtgtcgctcacttgtttggtgaagggtttctatccgagcgatattgcggtagagtgggaatccaacgggcagccagagaacaattacaagacgacgccaccagtgctggattcggatgggagctttttcttgtactcaaagttgaccgtggataaaagccggtggcagcagggtaatgtgttttcatgctcggtaatgcacgaggccctccataaccattatacgcagaaaagcctttcgctctcacccgggaaa

SEQ ID NO: 448 - DNA, 1140 bp, Artificial Sequence
  source: /note="Description of Artificial Sequence: Synthetic polynucleotide"
gcccctacgtcctcctcaactaaaaagacgcaacttcagcttgagcatcttcttctcgaccttcagatgattttgaacggaatcaataattacaaaaatcctaaacttactgaaatgctcacgtttaagttttatatgccaaaaaaggccactgagttgaaacaccttcaatgcttggaggaggaacttaaaccacttgaggaagccttgaatcttgctccgtccaaaaactttcatttgcggccacgagtcctgataagcaacatcaacgtgatcgtcctggaactgaaaggaagcgaaacgacgtttatgtgcgaatatgcagacgaaactgcgacaatcgttgaatttctcaatcgatggatcacttttagccaatctatcatcagcacgttgactggtggtggaggatcgggaggtggaggatctggaggaggaggatcgggtggaggaggatccgataaaactcatacgtgcccaccctgccccgcaccggagctgcttgggggtccttccgtattcttgtttccgccgaagccgaaggacacgcttatgattagcaggactcccgaagtgacgtgcgtcgtagtggacgtgtcgcatgaggacccggaggtcaagttcaactggtatgtcgatggcgtagaagtacacaatgcaaagactaaaccccgcgaagaacagtacggttcgacatacagagtagtgagcgtcttgactgtgctgcaccaggactggctcaacggaaaggagtataagtgtaaagtatcgaataaggcacttcccgcacctatcgagaaaacgatctccaaggctaagggtcagccaagagaaccccaagtctacactctgccccctagccgcgacgagcttacgaaaaaccaggtgtcgctcacttgtttggtgaagggtttctatccgagcgatattgcggtagagtgggaatccaacgggcagccagagaacaattacaagacgacgccaccagtgctggattcggatgggagctttttcttgtactcaaagttgaccgtggataaaagccggtggcagcagggtaatgtgttttcatgctcggtaatgcacgaggccctccataaccattatacgcagaaaagcctttcgctctcacccgggaaa

SEQ ID NO: 449 - DNA, 1140 bp, Artificial Sequence
  source: /note="Description of Artificial Sequence: Synthetic polynucleotide"
gcccctacgtcctcctcaactaaaaagacgcaacttcagcttgagcatcttcttctcgaccttcagatgattttgaacggaatcaataattacaaaaatcctaaacttactgaaatgctcacgtttaagttttatatgccaaaaaaggccactgagttgaaacaccttcaatgcttggaggaggaacttaaaccacttgaggaagccttgaatcttgctccgtccaaaaactttcatttgcggccacgagatctgataaggaacatcaacgtgatcgtcctggaactgaaaggaagcgaaacgacgtttatgtgcgaatatgcagacgaaactgcgacaatcgttgaatttctcaatcgatggatcacttttagccaatctatcatcagcacgttgactggtggtggaggatcgggaggtggaggatctggaggaggaggatcgggtggaggaggatccgataaaactcatacgtgcccaccctgccccgcaccggagctgcttgggggtccttccgtattcttgtttccgccgaagccgaaggacacgcttatgattagcaggactcccgaagtgacgtgcgtcgtagtggacgtgtcgcatgaggacccggaggtcaagttcaactggtatgtcgatggcgtagaagtacacaatgcaaagactaaaccccgcgaagaacagtacggttcgacatacagagtagtgagcgtcttgactgtgctgcaccaggactggctcaacggaaaggagtataagtgtaaagtatcgaataaggcacttcccgcacctatcgagaaaacgatctccaaggctaagggtcagccaagagaaccccaagtctacactctgccccctagccgcgacgagcttacgaaaaaccaggtgtcgctcacttgtttggtgaagggtttctatccgagcgatattgcggtagagtgggaatccaacgggcagccagagaacaattacaagacgacgccaccagtgctggattcggatgggagctttttcttgtactcaaagttgaccgtggataaaagccggtggcagcagggtaatgtgttttcatgctcggtaatgcacgaggccctccataaccattatacgcagaaaagcctttcgctctcacccgggaaa

SEQ ID NO: 450 - DNA, 1140 bp, Artificial Sequence
  source: /note="Description of Artificial Sequence: Synthetic polynucleotide"
gcccctacgtcctcctcaactaaaaagacgcaacttcagcttgagcatcttcttctcgaccttcagatgattttgaacggaatcaataattacaaaaatcctaaacttactgaaatgctcacgtttaagttttatatgccaaaaaaggccactgagttgaaacaccttcaatgcttggaggaggaacttaaaccacttgaggaagccttgaatcttgctccgtccaaaaactttcatttgcggccacgagatctgataagcaacatcaacgtgagcgtcctggaactgaaaggaagcgaaacgacgtttatgtgcgaatatgcagacgaaactgcgacaatcgttgaatttctcaatcgatggatcacttttagccaatctatcatcagcacgttgactggtggtggaggatcgggaggtggaggatctggaggaggaggatcgggtggaggaggatccgataaaactcatacgtgcccaccctgccccgcaccggagctgcttgggggtccttccgtattcttgtttccgccgaagccgaaggacacgcttatgattagcaggactcccgaagtgacgtgcgtcgtagtggacgtgtcgcatgaggacccggaggtcaagttcaactggtatgtcgatggcgtagaagtacacaatgcaaagactaaaccccgcgaagaacagtacggttcgacatacagagtagtgagcgtcttgactgtgctgcaccaggactggctcaacggaaaggagtataagtgtaaagtatcgaataaggcacttcccgcacctatcgagaaaacgatctccaaggctaagggtcagccaagagaaccccaagtctacactctgccccctagccgcgacgagcttacgaaaaaccaggtgtcgctcacttgtttggtgaagggtttctatccgagcgatattgcggtagagtgggaatccaacgggcagccagagaacaattacaagacgacgccaccagtgctggattcggatgggagctttttcttgtactcaaagttgaccgtggataaaagccggtggcagcagggtaatgtgttttcatgctcggtaatgcacgaggccctccataaccattatacgcagaaaagcctttcgctctcacccgggaaa

SEQ ID NO: 451 - DNA, 1140 bp, Artificial Sequence
  source: /note="Description of Artificial Sequence: Synthetic polynucleotide"
gcccctacgtcctcctcaactaaaaagacgcaacttcagcttgagaaccttcttctcgaccttcagatgattttgaacggaatcaataattacaaaaatcctaaacttactagaatgctcacgcagaagttttatatgccaaaaaaggccactgagttgaaacaccttcaatgcttggaggaggaacttaaaccacttgaggaagccttgaatcttgctccgtccaaaaactttcatttgcggccacgagatctgataagcaacatcaacgtgatcgtcctggaactgaaaggaagcgaaacgacgtttatgtgcgaatatgcagacgaaactgcgacaatcgttgaatttctcaatcgatggatcacttttagccaatctatcatcagcacgttgactggtggtggaggatcgggaggtggaggatctggaggaggaggatcgggtggaggaggatccgataaaactcatacgtgcccaccctgccccgcaccggagctgcttgggggtccttccgtattcttgtttccgccgaagccgaaggacacgcttatgattagcaggactcccgaagtgacgtgcgtcgtagtggacgtgtcgcatgaggacccggaggtcaagttcaactggtatgtcgatggcgtagaagtacacaatgcaaagactaaaccccgcgaagaacagtacggttcgacatacagagtagtgagcgtcttgactgtgctgcaccaggactggctcaacggaaaggagtataagtgtaaagtatcgaataaggcacttcccgcacctatcgagaaaacgatctccaaggctaagggtcagccaagagaaccccaagtctacactctgccccctagccgcgacgagcttacgaaaaaccaggtgtcgctcacttgtttggtgaagggtttctatccgagcgatattgcggtagagtgggaatccaacgggcagccagagaacaattacaagacgacgccaccagtgctggattcggatgggagctttttcttgtactcaaagttgaccgtggataaaagccggtggcagcagggtaatgtgttttcatgctcggtaatgcacgaggccctccataaccattatacgcagaaaagcctttcgctctcacccgggaaa

SEQ ID NO: 452 - DNA, 1140 bp, Artificial Sequence
  source: /note="Description of Artificial Sequence: Synthetic polynucleotide"
gcccctacgtcctcctcaactaaaaagacgcaacttcagcttgagcatcttcttctcgaccttcagatgattttgaacggaatcaataattacaaaaatcctaaacttactagaatgctcacgcagaagttttatatgccaaaaaaggccactgagttgaaacaccttcaatgcttggaggaggaacttaaaccacttgaggaagccttgaatcttgctccgtccaaaaactttcatttgcggccacgagatctgataagcaacatcaacgtgagcgtcctggaactgaaaggaagcgaaacgacgtttatgtgcgaatatgcagacgaaactgcgacaatcgttgaatttctcaatcgatggatcacttttagccaatctatcatcagcacgttgactggtggtggaggatcgggaggtggaggatctggaggaggaggatcgggtggaggaggatccgataaaactcatacgtgcccaccctgccccgcaccggagctgcttgggggtccttccgtattcttgtttccgccgaagccgaaggacacgcttatgattagcaggactcccgaagtgacgtgcgtcgtagtggacgtgtcgcatgaggacccggaggtcaagttcaactggtatgtcgatggcgtagaagtacacaatgcaaagactaaaccccgcgaagaacagtacggttcgacatacagagtagtgagcgtcttgactgtgctgcaccaggactggctcaacggaaaggagtataagtgtaaagtatcgaataaggcacttcccgcacctatcgagaaaacgatctccaaggctaagggtcagccaagagaaccccaagtctacactctgccccctagccgcgacgagcttacgaaaaaccaggtgtcgctcacttgtttggtgaagggtttctatccgagcgatattgcggtagagtgggaatccaacgggcagccagagaacaattacaagacgacgccaccagtgctggattcggatgggagctttttcttgtactcaaagttgaccgtggataaaagccggtggcagcagggtaatgtgttttcatgctcggtaatgcacgaggccctccataaccattatacgcagaaaagcctttcgctctcacccgggaaa

SEQ ID NO: 453 - DNA, 1140 bp, Artificial Sequence
  source: /note="Description of Artificial Sequence: Synthetic polynucleotide"
gcccctacgtcctcctcaactaaaaagacgcaacttcagcttgagaaccttcttctcgaccttcagatgattttgaacggaatcaataattacaaaaatcctgaacttactaacatgctcacgtttaagttttatatgccaaaaaaggccactgagttgaaacaccttcaatgcttggaggaggaacttaaaccacttgaggaagccttgaatcttgctccgtccaaaaactttcatttgcggccacgagatctgataagcaacatcaacgtgatcgtcctggaactgaaaggaagcgaaacgacgtttatgtgcgaatatgcagacgaaactgcgacaatcgttgaatttctcaatcgatggatcacttttagccaatctatcatcagcacgttgactggtggtggaggatcgggaggtggaggatctggaggaggaggatcgggtggaggaggatccgataaaactcatacgtgcccaccctgccccgcaccggagctgcttgggggtccttccgtattcttgtttccgccgaagccgaaggacacgcttatgattagcaggactcccgaagtgacgtgcgtcgtagtggacgtgtcgcatgaggacccggaggtcaagttcaactggtatgtcgatggcgtagaagtacacaatgcaaagactaaaccccgcgaagaacagtacggttcgacatacagagtagtgagcgtcttgactgtgctgcaccaggactggctcaacggaaaggagtataagtgtaaagtatcgaataaggcacttcccgcacctatcgagaaaacgatctccaaggctaagggtcagccaagagaaccccaagtctacactctgccccctagccgcgacgagcttacgaaaaaccaggtgtcgctcacttgtttggtgaagggtttctatccgagcgatattgcggtagagtgggaatccaacgggcagccagagaacaattacaagacgacgccaccagtgctggattcggatgggagctttttcttgtactcaaagttgaccgtggataaaagccggtggcagcagggtaatgtgttttcatgctcggtaatgcacgaggccctccataaccattatacgcagaaaagcctttcgctctcacccgggaaa

SEQ ID NO: 454 - DNA, 1140 bp, Artificial Sequence
  source: /note="Description of Artificial Sequence: Synthetic polynucleotide"
gcccctacgtcctcctcaactaaaaagacgcaacttcagcttgagcatcttcttctcgaccttcagatgattttgaacggaatcaataattacaaaaatcctaaacttactagaatgctcacgtttaagttttatatgccaaaaaaggccactgagttgaaacaccttcaatgcttggaggaggaacttaaaccacttgaggaagtattgaatcttgctcagtccaaaaactttcatttgcggccacgagatctgataagcaacatcaacgtgatcgtcctggaactgaaaggaagcgaaacgacgtttatgtgcgaatatgcagacgaaactgcgacaatcgttgaatttctcaatcgatggatcacttttagccaatctatcatcagcacgttgactggtggtggaggatcgggaggtggaggatctggaggaggaggatcgggtggaggaggatccgataaaactcatacgtgcccaccctgccccgcaccggaggcagcagggggtccttccgtattcttgtttccgccgaagccgaaggacacgcttatgattagcaggactcccgaagtgacgtgcgtcgtagtcgacgtgtcgcatgaggacccggaggtcaagttcaactggtatgtcgatggcgtagaagtacacaatgcaaagactaaaccccgcgaagaacagtacaattcgacatacagagtagtgagcgtcttgactgtgctgcaccaggactggctcaacggaaaggagtataagtgtaaagtatcgaataaggcacttggtgcacctatcgagaaaacgatctccaaggctaagggtcagccaagagaaccccaagtctacactctgccccctagccgcgacgagcttacgaaaaaccaggtgtcgctcacttgtttggtgaagggtttctatccgagcgatattgcggtagagtgggaatccaacgggcagccagagaacaattacaagacgacgccaccagtgctggattcggatgggagctttttcttgtactcaaagttgaccgtggataaaagccggtggcagcagggtaatgtgttttcatgctcggtaatgcacgaggccctccataaccattatacgcagaaaagcctttcgctctcacccgggaaa

SEQ ID NO: 455 - DNA, 1140 bp, Artificial Sequence
  source: /note="Description of Artificial Sequence: Synthetic polynucleotide"
gcccctacgtcctcctcaactaaaaagacgcaacttcagcttgagcatcttcttctcgaccttcagatgattttgaacggaatcaataattacaaaaatcctaaacttactagaatgctcacgtttaagttttatatgccaaaaaaggccactgagttgaaacaccttcaatgcttggaggaggaacttaaaccacttgaggaagccttgaatcttgctccgtccaaaaactttcatttgcggccacgagatctgataagcaacatcaacgtgatcgtcctggaactgaaaggaagcgaaacgacgtttatgtgcgaatatgcagacgaaactgcgacaatcgttgaatttctcaatcgatggatcacttttagccaatctatcatcagcacgttgactggtggtggaggatcgggaggtggaggatctggaggaggaggatcgggtggaggaggatccgataaaactcatacgtgcccaccctgccccgcaccggaggcagcagggggtccttccgtattcttgtttccgccgaagccgaaggacacgcttatgattagcaggactcccgaagtgacgtgcgtcgtagtcgacgtgtcgcatgaggacccggaggtcaagttcaactggtatgtcgatggcgtagaagtacacaatgcaaagactaaaccccgcgaagaacagtacaattcgacatacagagtagtgagcgtcttgactgtgctgcaccaggactggctcaacggaaaggagtataagtgtaaagtatcgaataaggcacttggtgcacctatcgagaaaacgatctccaaggctaagggtcagccaagagaaccccaagtctacactctgccccctagccgcgacgagcttacgaaaaaccaggtgtcgctcacttgtttggtgaagggtttctatccgagcgatattgcggtagagtgggaatccaacgggcagccagagaacaattacaagacgacgccaccagtgctggattcggatgggagctttttcttgtactcaaagttgaccgtggataaaagccggtggcagcagggtaatgtgttttcatgctcggtaatgcacgaggccctccataaccattatacgcagaaaagcctttcgctctcacccgggaaa

SEQ ID NO: 456 - DNA, 1140 bp, Artificial Sequence
  source: /note="Description of Artificial Sequence: Synthetic polynucleotide"
gcccctacgtcctcctcaactaaaaagacgcaacttcagcttgaggatcttcttctcgaccttcagatgattttgaacggaatcaataattacaaaaatcctaaacttactagaatgctcacgtttaagttttatatgccaaaaaaggccactgagttgaaacaccttcaatgcttggaggaggaacttaaaccacttgaggaagccttgaatcttgctccgtccaaaaactttcatttgcggccacgagatctgataagcaacatcaacgtgatcgtcctggaactgaaaggaagcgaaacgacgtttatgtgcgaatatgcagacgaaactgcgacaatcgttgaatttctcaatcgatggatcacttttagccaatctatcatcagcacgttgactggtggtggaggatcgggaggtggaggatctggaggaggaggatcgggtggaggaggatccgataaaactcatacgtgcccaccctgccccgcaccggaggcagcagggggtccttccgtattcttgtttccgccgaagccgaaggacacgcttatgattagcaggactcccgaagtgacgtgcgtcgtagtcgacgtgtcgcatgaggacccggaggtcaagttcaactggtatgtcgatggcgtagaagtacacaatgcaaagactaaaccccgcgaagaacagtacaattcgacatacagagtagtgagcgtcttgactgtgctgcaccaggactggctcaacggaaaggagtataagtgtaaagtatcgaataaggcacttggtgcacctatcgagaaaacgatctccaaggctaagggtcagccaagagaaccccaagtctacactctgccccctagccgcgacgagcttacgaaaaaccaggtgtcgctcacttgtttggtgaagggtttctatccgagcgatattgcggtagagtgggaatccaacgggcagccagagaacaattacaagacgacgccaccagtgctggattcggatgggagctttttcttgtactcaaagttgaccgtggataaaagccggtggcagcagggtaatgtgttttcatgctcggtaatgcacgaggccctccataaccattatacgcagaaaagcctttcgctctcacccgggaaa

SEQ ID NO: 457 - DNA, 1140 bp, Artificial Sequence
  source: /note="Description of Artificial Sequence: Synthetic polynucleotide"
gcccctacgtcctcctcaactaaaaagacgcaacttcagcttgagaatcttcttctcgaccttcagatgattttgaacggaatcaataattacaaaaatcctaaacttactagaatgctcacgtttaagttttatatgccaaaaaaggccactgagttgaaacaccttcaatgcttggaggaggaacttaaaccacttgaggaagccttgaatcttgctccgtccaaaaactttcatttgcggccacgagatctgataagcaacatcaacgtgatcgtcctggaactgaaaggaagcgaaacgacgtttatgtgcgaatatgcagacgaaactgcgacaatcgttgaatttctcaatcgatggatcacttttagccaatctatcatcagcacgttgactggtggtggaggatcgggaggtggaggatctggaggaggaggatcgggtggaggaggatccgataaaactcatacgtgcccaccctgccccgcaccggaggcagcagggggtccttccgtattcttgtttccgccgaagccgaaggacacgcttatgattagcaggactcccgaagtgacgtgcgtcgtagtcgacgtgtcgcatgaggacccggaggtcaagttcaactggtatgtcgatggcgtagaagtacacaatgcaaagactaaaccccgcgaagaacagtacaattcgacatacagagtagtgagcgtcttgactgtgctgcaccaggactggctcaacggaaaggagtataagtgtaaagtatcgaataaggcacttggtgcacctatcgagaaaacgatctccaaggctaagggtcagccaagagaaccccaagtctacactctgccccctagccgcgacgagcttacgaaaaaccaggtgtcgctcacttgtttggtgaagggtttctatccgagcgatattgcggtagagtgggaatccaacgggcagccagagaacaattacaagacgacgccaccagtgctggattcggatgggagctttttcttgtactcaaagttgaccgtggataaaagccggtggcagcagggtaatgtgttttcatgctcggtaatgcacgaggccctccataaccattatacgcagaaaagcctttcgctctcacccgggaaa

SEQ ID NO: 458 - DNA, 1140 bp, Artificial Sequence
  source: /note="Description of Artificial Sequence: Synthetic polynucleotide"
gcccctacgtcctcctcaactaaaaagacgcaacttcagcttgagctgcttcttctcgaccttcagatgattttgaacggaatcaataattacaaaaatcctaaacttactagaatgctcacgtttaagttttatatgccaaaaaaggccactgagttgaaacaccttcaatgcttggaggaggaacttaaaccacttgaggaagccttgaatcttgctccgtccaaaaactttcatttgcggccacgagatctgataagcaacatcaacgtgatcgtcctggaactgaaaggaagcgaaacgacgtttatgtgcgaatatgcagacgaaactgcgacaatcgttgaatttctcaatcgatggatcacttttagccaatctatcatcagcacgttgactggtggtggaggatcgggaggtggaggatctggaggaggaggatcgggtggaggaggatccgataaaactcatacgtgcccaccctgccccgcaccggaggcagcagggggtccttccgtattcttgtttccgccgaagccgaaggacacgcttatgattagcaggactcccgaagtgacgtgcgtcgtagtcgacgtgtcgcatgaggacccggaggtcaagttcaactggtatgtcgatggcgtagaagtacacaatgcaaagactaaaccccgcgaagaacagtacaattcgacatacagagtagtgagcgtcttgactgtgctgcaccaggactggctcaacggaaaggagtataagtgtaaagtatcgaataaggcacttggtgcacctatcgagaaaacgatctccaaggctaagggtcagccaagagaaccccaagtctacactctgccccctagccgcgacgagcttacgaaaaaccaggtgtcgctcacttgtttggtgaagggtttctatccgagcgatattgcggtagagtgggaatccaacgggcagccagagaacaattacaagacgacgccaccagtgctggattcggatgggagctttttcttgtactcaaagttgaccgtggataaaagccggtggcagcagggtaatgtgttttcatgctcggtaatgcacgaggccctccataaccattatacgcagaaaagcctttcgctctcacccgggaaa

SEQ ID NO: 459 - DNA, 1140 bp, Artificial Sequence
  source: /note="Description of Artificial Sequence: Synthetic polynucleotide"
gcccctacgtcctcctcaactaaaaagacgcaacttcagcttgagcatcttcttctcgaccttcagatgattttgaacggaaccaataattacaaaaatcctaaacttactagaatgctcacgtttaagttttatatgccaaaaaaggccactgagttgaaacaccttcaatgcttggaggaggaacttaaaccacttgaggaagccttgaatcttgctccgtccaaaaactttcatttgcggccacgagatctgataagcaacatcaacgtgatcgtcctggaactgaaaggaagcgaaacgacgtttatgtgcgaatatgcagacgaaactgcgacaatcgttgaatttctcaatcgatggatcacttttagccaatctatcatcagcacgttgactggtggtggaggatcgggaggtggaggatctggaggaggaggatcgggtggaggaggatccgataaaactcatacgtgcccaccctgccccgcaccggaggcagcagggggtccttccgtattcttgtttccgccgaagccgaaggacacgcttatgattagcaggactcccgaagtgacgtgcgtcgtagtcgacgtgtcgcatgaggacccggaggtcaagttcaactggtatgtcgatggcgtagaagtacacaatgcaaagactaaaccccgcgaagaacagtacaattcgacatacagagtagtgagcgtcttgactgtgctgcaccaggactggctcaacggaaaggagtataagtgtaaagtatcgaataaggcacttggtgcacctatcgagaaaacgatctccaaggctaagggtcagccaagagaaccccaagtctacactctgccccctagccgcgacgagcttacgaaaaaccaggtgtcgctcacttgtttggtgaagggtttctatccgagcgatattgcggtagagtgggaatccaacgggcagccagagaacaattacaagacgacgccaccagtgctggattcggatgggagctttttcttgtactcaaagttgaccgtggataaaagccggtggcagcagggtaatgtgttttcatgctcggtaatgcacgaggccctccataaccattatacgcagaaaagcctttcgctctcacccgggaaa

SEQ ID NO: 460 - DNA, 1140 bp, Artificial Sequence
  source: /note="Description of Artificial Sequence: Synthetic polynucleotide"
gcccctacgtcctcctcaactaaaaagacgcaacttcagcttgagcatcttcttctcgaccttcagatgattttgaacggaatcaataattacaaaaatcctaaacttactagaatgctcacgtttaagttttatatgccaaaaaaggccactgagttgaaacaccttcaatgcttggaggaggaacttaaaccacttgaggaagccttgaatcttgctccgtccaaaaactttcatttgcggccacgagttctgataagcaacatcaacgtgatcgtcctggaactgaaaggaagcgaaacgacgtttatgtgcgaatatgcagacgaaactgcgacaatcgttgaatttctcaatcgatggatcacttttagccaatctatcatcagcacgttgactggtggtggaggatcgggaggtggaggatctggaggaggaggatcgggtggaggaggatccgataaaactcatacgtgcccaccctgccccgcaccggaggcagcagggggtccttccgtattcttgtttccgccgaagccgaaggacacgcttatgattagcaggactcccgaagtgacgtgcgtcgtagtcgacgtgtcgcatgaggacccggaggtcaagttcaactggtatgtcgatggcgtagaagtacacaatgcaaagactaaaccccgcgaagaacagtacaattcgacatacagagtagtgagcgtcttgactgtgctgcaccaggactggctcaacggaaaggagtataagtgtaaagtatcgaataaggcacttggtgcacctatcgagaaaacgatctccaaggctaagggtcagccaagagaaccccaagtctacactctgccccctagccgcgacgagcttacgaaaaaccaggtgtcgctcacttgtttggtgaagggtttctatccgagcgatattgcggtagagtgggaatccaacgggcagccagagaacaattacaagacgacgccaccagtgctggattcggatgggagctttttcttgtactcaaagttgaccgtggataaaagccggtggcagcagggtaatgtgttttcatgctcggtaatgcacgaggccctccataaccattatacgcagaaaagcctttcgctctcacccgggaaa

SEQ ID NO: 461 - DNA, 1140 bp, Artificial Sequence
  source: /note="Description of Artificial Sequence: Synthetic polynucleotide"
gcccctacgtcctcctcaactaaaaagacgcaacttcagcttgagcatcttcttctcgaccttcagatgattttgaacggaatcaataattacaaaaatcctaaacttactagaatgctcacgtttaagttttatatgccaaaaaaggccactgagttgaaacaccttcaatgcttggaggaggaacttaaaccacttgaggaagccttgaatcttgctccgtccaaaaactttcatttgcggccacgagatctgatacgtaacatcaacgtgatcgtcctggaactgaaaggaagcgaaacgacgtttatgtgcgaatatgcagacgaaactgcgacaatcgttgaatttctcaatcgatggatcacttttagccaatctatcatcagcacgttgactggtggtggaggatcgggaggtggaggatctggaggaggaggatcgggtggaggaggatccgataaaactcatacgtgcccaccctgccccgcaccggaggcagcagggggtccttccgtattcttgtttccgccgaagccgaaggacacgcttatgattagcaggactcccgaagtgacgtgcgtcgtagtcgacgtgtcgcatgaggacccggaggtcaagttcaactggtatgtcgatggcgtagaagtacacaatgcaaagactaaaccccgcgaagaacagtacaattcgacatacagagtagtgagcgtcttgactgtgctgcaccaggactggctcaacggaaaggagtataagtgtaaagtatcgaataaggcacttggtgcacctatcgagaaaacgatctccaaggctaagggtcagccaagagaaccccaagtctacactctgccccctagccgcgacgagcttacgaaaaaccaggtgtcgctcacttgtttggtgaagggtttctatccgagcgatattgcggtagagtgggaatccaacgggcagccagagaacaattacaagacgacgccaccagtgctggattcggatgggagctttttcttgtactcaaagttgaccgtggataaaagccggtggcagcagggtaatgtgttttcatgctcggtaatgcacgaggccctccataaccattatacgcagaaaagcctttcgctctcacccgggaaa

SEQ ID NO: 462 - DNA, 1140 bp, Artificial Sequence
  source: /note="Description of Artificial Sequence: Synthetic polynucleotide"
gcccctacgtcctcctcaactaaaaagacgcaacttcagcttgagcatcttcttctcgaccttcagatgattttgaacggaatcaataattacaaaaatcctaaacttactagaatgctcacgtttaagttttatatgccaaaaaaggccactgagttgaaacaccttcaatgcttggaggaggaacttaaaccacttgaggaagccttgaatcttgctccgtccaaaaactttcatttgcggccacgagatctgataagcctgatcaacgtgatcgtcctggaactgaaaggaagcgaaacgacgtttatgtgcgaatatgcagacgaaactgcgacaatcgttgaatttctcaatcgatggatcacttttagccaatctatcatcagcacgttgactggtggtggaggatcgggaggtggaggatctggaggaggaggatcgggtggaggaggatccgataaaactcatacgtgcccaccctgccccgcaccggaggcagcagggggtccttccgtattcttgtttccgccgaagccgaaggacacgcttatgattagcaggactcccgaagtgacgtgcgtcgtagtcgacgtgtcgcatgaggacccggaggtcaagttcaactggtatgtcgatggcgtagaagtacacaatgcaaagactaaaccccgcgaagaacagtacaattcgacatacagagtagtgagcgtcttgactgtgctgcaccaggactggctcaacggaaaggagtataagtgtaaagtatcgaataaggcacttggtgcacctatcgagaaaacgatctccaaggctaagggtcagccaagagaaccccaagtctacactctgccccctagccgcgacgagcttacgaaaaaccaggtgtcgctcacttgtttggtgaagggtttctatccgagcgatattgcggtagagtgggaatccaacgggcagccagagaacaattacaagacgacgccaccagtgctggattcggatgggagctttttcttgtactcaaagttgaccgtggataaaagccggtggcagcagggtaatgtgttttcatgctcggtaatgcacgaggccctccataaccattatacgcagaaaagcctttcgctctcacccgggaaa

SEQ ID NO: 463 - DNA, 1140 bp, Artificial Sequence
  source: /note="Description of Artificial Sequence: Synthetic polynucleotide"
gcccctacgtcctcctcaactaaaaagacgcaacttcagcttgagcatcttcttctcgaccttcagatgattttgaacggaatcaataattacaaaaatcctaaacttactagaatgctcacgtttaagttttatatgccaaaaaaggccactgagttgaaacaccttcaatgcttggaggaggaacttaaaccacttgaggaagccttgaatcttgctccgtccaaaaactttcatttgcggccacgagatctgataagcagcatcaacgtgatcgtcctggaactgaaaggaagcgaaacgacgtttatgtgcgaatatgcagacgaaactgcgacaatcgttgaatttctcaatcgatggatcacttttagccaatctatcatcagcacgttgactggtggtggaggatcgggaggtggaggatctggaggaggaggatcgggtggaggaggatccgataaaactcatacgtgcccaccctgccccgcaccggaggcagcagggggtccttccgtattcttgtttccgccgaagccgaaggacacgcttatgattagcaggactcccgaagtgacgtgcgtcgtagtcgacgtgtcgcatgaggacccggaggtcaagttcaactggtatgtcgatggcgtagaagtacacaatgcaaagactaaaccccgcgaagaacagtacaattcgacatacagagtagtgagcgtcttgactgtgctgcaccaggactggctcaacggaaaggagtataagtgtaaagtatcgaataaggcacttggtgcacctatcgagaaaacgatctccaaggctaagggtcagccaagagaaccccaagtctacactctgccccctagccgcgacgagcttacgaaaaaccaggtgtcgctcacttgtttggtgaagggtttctatccgagcgatattgcggtagagtgggaatccaacgggcagccagagaacaattacaagacgacgccaccagtgctggattcggatgggagctttttcttgtactcaaagttgaccgtggataaaagccggtggcagcagggtaatgtgttttcatgctcggtaatgcacgaggccctccataaccattatacgcagaaaagcctttcgctctcacccgggaaa

SEQ ID NO: 464 - DNA, 1140 bp, Artificial Sequence
  source: /note="Description of Artificial Sequence: Synthetic polynucleotide"
gcccctacgtcctcctcaactaaaaagacgcaacttcagcttgagcatcttcttctcgaccttcagatgattttgaacggaatcaataattacaaaaatcctaaacttactagaatgctcacgtttaagttttatatgccaaaaaaggccactgagttgaaacaccttcaatgcttggaggaggaacttaaaccacttgaggaagccttgaatcttgctccgtccaaaaactttcatttgcggccacgagatctgataagcaacatcaacgtgagcgtcctggaactgaaaggaagcgaaacgacgtttatgtgcgaatatgcagacgaaactgcgacaatcgttgaatttctcaatcgatggatcacttttagccaatctatcatcagcacgttgactggtggtggaggatcgggaggtggaggatctggaggaggaggatcgggtggaggaggatccgataaaactcatacgtgcccaccctgccccgcaccggaggcagcagggggtccttccgtattcttgtttccgccgaagccgaaggacacgcttatgattagcaggactcccgaagtgacgtgcgtcgtagtcgacgtgtcgcatgaggacccggaggtcaagttcaactggtatgtcgatggcgtagaagtacacaatgcaaagactaaaccccgcgaagaacagtacaattcgacatacagagtagtgagcgtcttgactgtgctgcaccaggactggctcaacggaaaggagtataagtgtaaagtatcgaataaggcacttggtgcacctatcgagaaaacgatctccaaggctaagggtcagccaagagaaccccaagtctacactctgccccctagccgcgacgagcttacgaaaaaccaggtgtcgctcacttgtttggtgaagggtttctatccgagcgatattgcggtagagtgggaatccaacgggcagccagagaacaattacaagacgacgccaccagtgctggattcggatgggagctttttcttgtactcaaagttgaccgtggataaaagccggtggcagcagggtaatgtgttttcatgctcggtaatgcacgaggccctccataaccattatacgcagaaaagcctttcgctctcacccgggaaa

SEQ ID NO: 465 - DNA, 1140 bp, Artificial Sequence
  source: /note="Description of Artificial Sequence: Synthetic polynucleotide"
gcccctacgtcctcctcaactaaaaagacgcaacttcagcttgagcatcttcttctcgaccttcagatgattttgaacggaatcaataattacaaaaatcctgaacttactagaatgctcacgtttaagttttatatgccaaaaaaggccactgagttgaaacaccttcaatgcttggaggaggaacttaaaccacttgaggaagccttgaatcttgctccgtccaaaaactttcatttgcggccacgagatctgataagcaacatcaacgtgatcgtcctggaactgaaaggaagcgaaacgacgtttatgtgcgaatatgcagacgaaactgcgacaatcgttgaatttctcaatcgatggatcacttttagccaatctatcatcagcacgttgactggtggtggaggatcgggaggtggaggatctggaggaggaggatcgggtggaggaggatccgataaaactcatacgtgcccaccctgccccgcaccggaggcagcagggggtccttccgtattcttgtttccgccgaagccgaaggacacgcttatgattagcaggactcccgaagtgacgtgcgtcgtagtcgacgtgtcgcatgaggacccggaggtcaagttcaactggtatgtcgatggcgtagaagtacacaatgcaaagactaaaccccgcgaagaacagtacaattcgacatacagagtagtgagcgtcttgactgtgctgcaccaggactggctcaacggaaaggagtataagtgtaaagtatcgaataaggcacttggtgcacctatcgagaaaacgatctccaaggctaagggtcagccaagagaaccccaagtctacactctgccccctagccgcgacgagcttacgaaaaaccaggtgtcgctcacttgtttggtgaagggtttctatccgagcgatattgcggtagagtgggaatccaacgggcagccagagaacaattacaagacgacgccaccagtgctggattcggatgggagctttttcttgtactcaaagttgaccgtggataaaagccggtggcagcagggtaatgtgttttcatgctcggtaatgcacgaggccctccataaccattatacgcagaaaagcctttcgctctcacccgggaaa

SEQ ID NO: 466 - DNA, 1140 bp, Artificial Sequence
  source: /note="Description of Artificial Sequence: Synthetic polynucleotide"
gcccctacgtcctcctcaactaaaaagacgcaacttcagcttgagaaccttcttctcgaccttcagatgattttgaacggaatcaataattacaaaaatcctgaacttactagaatgctcacgtttaagttttatatgccaaaaaaggccactgagttgaaacaccttcaatgcttggaggaggaacttaaaccacttgaggaagccttgaatcttgctccgtccaaaaactttcatttgcggccacgagatctgataagcaacatcaacgtgatcgtcctggaactgaaaggaagcgaaacgacgtttatgtgcgaatatgcagacgaaactgcgacaatcgttgaatttctcaatcgatggatcacttttagccaatctatcatcagcacgttgactggtggtggaggatcgggaggtggaggatctggaggaggaggatcgggtggaggaggatccgataaaactcatacgtgcccaccctgccccgcaccggaggcagcagggggtccttccgtattcttgtttccgccgaagccgaaggacacgcttatgattagcaggactcccgaagtgacgtgcgtcgtagtcgacgtgtcgcatgaggacccggaggtcaagttcaactggtatgtcgatggcgtagaagtacacaatgcaaagactaaaccccgcgaagaacagtacaattcgacatacagagtagtgagcgtcttgactgtgctgcaccaggactggctcaacggaaaggagtataagtgtaaagtatcgaataaggcacttggtgcacctatcgagaaaacgatctccaaggctaagggtcagccaagagaaccccaagtctacactctgccccctagccgcgacgagcttacgaaaaaccaggtgtcgctcacttgtttggtgaagggtttctatccgagcgatattgcggtagagtgggaatccaacgggcagccagagaacaattacaagacgacgccaccagtgctggattcggatgggagctttttcttgtactcaaagttgaccgtggataaaagccggtggcagcagggtaatgtgttttcatgctcggtaatgcacgaggccctccataaccattatacgcagaaaagcctttcgctctcacccgggaaa

SEQ ID NO: 467 - DNA, 1140 bp, Artificial Sequence
  source: /note="Description of Artificial Sequence: Synthetic polynucleotide"
gcccctacgtcctcctcaactaaaaagacgcaacttcagcttgagctgcttcttctcgaccttcagatgattttgaacggaatcaataattacaaaaatcctgaacttactagaatgctcacgtttaagttttatatgccaaaaaaggccactgagttgaaacaccttcaatgcttggaggaggaacttaaaccacttgaggaagccttgaatcttgctccgtccaaaaactttcatttgcggccacgagatctgataagcaacatcaacgtgatcgtcctggaactgaaaggaagcgaaacgacgtttatgtgcgaatatgcagacgaaactgcgacaatcgttgaatttctcaatcgatggatcacttttagccaatctatcatcagcacgttgactggtggtggaggatcgggaggtggaggatctggaggaggaggatcgggtggaggaggatccgataaaactcatacgtgcccaccctgccccgcaccggaggcagcagggggtccttccgtattcttgtttccgccgaagccgaaggacacgcttatgattagcaggactcccgaagtgacgtgcgtcgtagtcgacgtgtcgcatgaggacccggaggtcaagttcaactggtatgtcgatggcgtagaagtacacaatgcaaagactaaaccccgcgaagaacagtacaattcgacatacagagtagtgagcgtcttgactgtgctgcaccaggactggctcaacggaaaggagtataagtgtaaagtatcgaataaggcacttggtgcacctatcgagaaaacgatctccaaggctaagggtcagccaagagaaccccaagtctacactctgccccctagccgcgacgagcttacgaaaaaccaggtgtcgctcacttgtttggtgaagggtttctatccgagcgatattgcggtagagtgggaatccaacgggcagccagagaacaattacaagacgacgccaccagtgctggattcggatgggagctttttcttgtactcaaagttgaccgtggataaaagccggtggcagcagggtaatgtgttttcatgctcggtaatgcacgaggccctccataaccattatacgcagaaaagcctttcgctctcacccgggaaa

SEQ ID NO: 468 - DNA, 1140 bp, Artificial Sequence
  source: /note="Description of Artificial Sequence: Synthetic polynucleotide"
gcccctacgtcctcctcaactaaaaagacgcaacttcagcttgagcatcttcttctcgaccttcagatgattttgaacggaatcaataattacaaaaatcctgaacttactagaatgctcacgtttaagttttatatgccaaaaaaggccactgagttgaaacaccttcaatgcttggaggaggaacttaaaccacttgaggaagccttgaatcttgctccgtccaaaaactttcatttgcggccacgagtgctgataagcaacatcaacgtgatcgtcctggaactgaaaggaagcgaaacgacgtttatgtgcgaatatgcagacgaaactgcgacaatcgttgaatttctcaatcgatggatcacttttagccaatctatcatcagcacgttgactggtggtggaggatcgggaggtggaggatctggaggaggaggatcgggtggaggaggatccgataaaactcatacgtgcccaccctgccccgcaccggaggcagcagggggtccttccgtattcttgtttccgccgaagccgaaggacacgcttatgattagcaggactcccgaagtgacgtgcgtcgtagtcgacgtgtcgcatgaggacccggaggtcaagttcaactggtatgtcgatggcgtagaagtacacaatgcaaagactaaaccccgcgaagaacagtacaattcgacatacagagtagtgagcgtcttgactgtgctgcaccaggactggctcaacggaaaggagtataagtgtaaagtatcgaataaggcacttggtgcacctatcgagaaaacgatctccaaggctaagggtcagccaagagaaccccaagtctacactctgccccctagccgcgacgagcttacgaaaaaccaggtgtcgctcacttgtttggtgaagggtttctatccgagcgatattgcggtagagtgggaatccaacgggcagccagagaacaattacaagacgacgccaccagtgctggattcggatgggagctttttcttgtactcaaagttgaccgtggataaaagccggtggcagcagggtaatgtgttttcatgctcggtaatgcacgaggccctccataaccattatacgcagaaaagcctttcgctctcacccgggaaa

SEQ ID NO: 469 - DNA, 1140 bp, Artificial Sequence
  source: /note="Description of Artificial Sequence: Synthetic polynucleotide"
gcccctacgtcctcctcaactaaaaagacgcaacttcagcttgagcatcttcttctcgaccttcagatgattttgaacggaatcaataattacaaaaatcctgaacttactagaatgctcacgtttaagttttatatgccaaaaaaggccactgagttgaaacaccttcaatgcttggaggaggaacttaaaccacttgaggaagccttgaatcttgctccgtccaaaaactttcatttgcggccacgagatctgataagcaacatcaacgtgagcgtcctggaactgaaaggaagcgaaacgacgtttatgtgcgaatatgcagacgaaactgcgacaatcgttgaatttctcaatcgatggatcacttttagccaatctatcatcagcacgttgactggtggtggaggatcgggaggtggaggatctggaggaggaggatcgggtggaggaggatccgataaaactcatacgtgcccaccctgccccgcaccggaggcagcagggggtccttccgtattcttgtttccgccgaagccgaaggacacgcttatgattagcaggactcccgaagtgacgtgcgtcgtagtcgacgtgtcgcatgaggacccggaggtcaagttcaactggtatgtcgatggcgtagaagtacacaatgcaaagactaaaccccgcgaagaacagtacaattcgacatacagagtagtgagcgtcttgactgtgctgcaccaggactggctcaacggaaaggagtataagtgtaaagtatcgaataaggcacttggtgcacctatcgagaaaacgatctccaaggctaagggtcagccaagagaaccccaagtctacactctgccccctagccgcgacgagcttacgaaaaaccaggtgtcgctcacttgtttggtgaagggtttctatccgagcgatattgcggtagagtgggaatccaacgggcagccagagaacaattacaagacgacgccaccagtgctggattcggatgggagctttttcttgtactcaaagttgaccgtggataaaagccggtggcagcagggtaatgtgttttcatgctcggtaatgcacgaggccctccataaccattatacgcagaaaagcctttcgctctcacccgggaaa

SEQ ID NO: 470 - DNA, 1140 bp, Artificial Sequence
  source: /note="Description of Artificial Sequence: Synthetic polynucleotide"
gcccctacgtcctcctcaactaaaaagacgcaacttcagcttgagcatcttcttctcgaccttcagatgattttgaacggaatcaataattacaaaaatcctaaacttactcagatgctcacgtttaagttttatatgccaaaaaaggccactgagttgaaacaccttcaatgcttggaggaggaacttaaaccacttgaggaagccttgaatcttgctccgtccaaaaactttcatttgcggccacgagatctgataagcaacatcaacgtgatcgtcctggaactgaaaggaagcgaaacgacgtttatgtgcgaatatgcagacgaaactgcgacaatcgttgaatttctcaatcgatggatcacttttagccaatctatcatcagcacgttgactggtggtggaggatcgggaggtggaggatctggaggaggaggatcgggtggaggaggatccgataaaactcatacgtgcccaccctgccccgcaccggaggcagcagggggtccttccgtattcttgtttccgccgaagccgaaggacacgcttatgattagcaggactcccgaagtgacgtgcgtcgtagtcgacgtgtcgcatgaggacccggaggtcaagttcaactggtatgtcgatggcgtagaagtacacaatgcaaagactaaaccccgcgaagaacagtacaattcgacatacagagtagtgagcgtcttgactgtgctgcaccaggactggctcaacggaaaggagtataagtgtaaagtatcgaataaggcacttggtgcacctatcgagaaaacgatctccaaggctaagggtcagccaagagaaccccaagtctacactctgccccctagccgcgacgagcttacgaaaaaccaggtgtcgctcacttgtttggtgaagggtttctatccgagcgatattgcggtagagtgggaatccaacgggcagccagagaacaattacaagacgacgccaccagtgctggattcggatgggagctttttcttgtactcaaagttgaccgtggataaaagccggtggcagcagggtaatgtgttttcatgctcggtaatgcacgaggccctccataaccattatacgcagaaaagcctttcgctctcacccgggaaa

SEQ ID NO: 471 - DNA, 1140 bp, Artificial Sequence
  source: /note="Description of Artificial Sequence: Synthetic polynucleotide"
gcccctacgtcctcctcaactaaaaagacgcaacttcagcttgagaaccttcttctcgaccttcagatgattttgaacggaatcaataattacaaaaatcctaaacttactcagatgctcacgtttaagttttatatgccaaaaaaggccactgagttgaaacaccttcaatgcttggaggaggaacttaaaccacttgaggaagccttgaatcttgctccgtccaaaaactttcatttgcggccacgagatctgataagcaacatcaacgtgatcgtcctggaactgaaaggaagcgaaacgacgtttatgtgcgaatatgcagacgaaactgcgacaatcgttgaatttctcaatcgatggatcacttttagccaatctatcatcagcacgttgactggtggtggaggatcgggaggtggaggatctggaggaggaggatcgggtggaggaggatccgataaaactcatacgtgcccaccctgccccgcaccggaggcagcagggggtccttccgtattcttgtttccgccgaagccgaaggacacgcttatgattagcaggactcccgaagtgacgtgcgtcgtagtcgacgtgtcgcatgaggacccggaggtcaagttcaactggtatgtcgatggcgtagaagtacacaatgcaaagactaaaccccgcgaagaacagtacaattcgacatacagagtagtgagcgtcttgactgtgctgcaccaggactggctcaacggaaaggagtataagtgtaaagtatcgaataaggcacttggtgcacctatcgagaaaacgatctccaaggctaagggtcagccaagagaaccccaagtctacactctgccccctagccgcgacgagcttacgaaaaaccaggtgtcgctcacttgtttggtgaagggtttctatccgagcgatattgcggtagagtgggaatccaacgggcagccagagaacaattacaagacgacgccaccagtgctggattcggatgggagctttttcttgtactcaaagttgaccgtggataaaagccggtggcagcagggtaatgtgttttcatgctcggtaatgcacgaggccctccataaccattatacgcagaaaagcctttcgctctcacccgggaaa

SEQ ID NO: 472 - DNA, 1140 bp, Artificial Sequence
  source: /note="Description of Artificial Sequence: Synthetic polynucleotide"
gcccctacgtcctcctcaactaaaaagacgcaacttcagcttgagctgcttcttctcgaccttcagatgattttgaacggaatcaataattacaaaaatcctaaacttactcagatgctcacgtttaagttttatatgccaaaaaaggccactgagttgaaacaccttcaatgcttggaggaggaacttaaaccacttgaggaagccttgaatcttgctccgtccaaaaactttcatttgcggccacgagatctgataagcaacatcaacgtgatcgtcctggaactgaaaggaagcgaaacgacgtttatgtgcgaatatgcagacgaaactgcgacaatcgttgaatttctcaatcgatggatcacttttagccaatctatcatcagcacgttgactggtggtggaggatcgggaggtggaggatctggaggaggaggatcgggtggaggaggatccgataaaactcatacgtgcccaccctgccccgcaccggaggcagcagggggtccttccgtattcttgtttccgccgaagccgaaggacacgcttatgattagcaggactcccgaagtgacgtgcgtcgtagtcgacgtgtcgcatgaggacccggaggtcaagttcaactggtatgtcgatggcgtagaagtacacaatgcaaagactaaaccccgcgaagaacagtacaattcgacatacagagtagtgagcgtcttgactgtgctgcaccaggactggctcaacggaaaggagtataagtgtaaagtatcgaataaggcacttggtgcacctatcgagaaaacgatctccaaggctaagggtcagccaagagaaccccaagtctacactctgccccctagccgcgacgagcttacgaaaaaccaggtgtcgctcacttgtttggtgaagggtttctatccgagcgatattgcggtagagtgggaatccaacgggcagccagagaacaattacaagacgacgccaccagtgctggattcggatgggagctttttcttgtactcaaagttgaccgtggataaaagccggtggcagcagggtaatgtgttttcatgctcggtaatgcacgaggccctccataaccattatacgcagaaaagcctttcgctctcacccgggaaa

SEQ ID NO: 473 - DNA, 1140 bp, Artificial Sequence
  source: /note="Description of Artificial Sequence: Synthetic polynucleotide"
gcccctacgtcctcctcaactaaaaagacgcaacttcagcttgagcatcttcttctcgaccttcagatgattttgaacggaatcaataattacaaaaatcctaaacttactcagatgctcacgtttaagttttatatgccaaaaaaggccactgagttgaaacaccttcaatgcttggaggaggaacttaaaccacttgaggaagccttgaatcttgctccgtccaaaaactttcatttgcggccacgagtgctgataagcaacatcaacgtgatcgtcctggaactgaaaggaagcgaaacgacgtttatgtgcgaatatgcagacgaaactgcgacaatcgttgaatttctcaatcgatggatcacttttagccaatctatcatcagcacgttgactggtggtggaggatcgggaggtggaggatctggaggaggaggatcgggtggaggaggatccgataaaactcatacgtgcccaccctgccccgcaccggaggcagcagggggtccttccgtattcttgtttccgccgaagccgaaggacacgcttatgattagcaggactcccgaagtgacgtgcgtcgtagtcgacgtgtcgcatgaggacccggaggtcaagttcaactggtatgtcgatggcgtagaagtacacaatgcaaagactaaaccccgcgaagaacagtacaattcgacatacagagtagtgagcgtcttgactgtgctgcaccaggactggctcaacggaaaggagtataagtgtaaagtatcgaataaggcacttggtgcacctatcgagaaaacgatctccaaggctaagggtcagccaagagaaccccaagtctacactctgccccctagccgcgacgagcttacgaaaaaccaggtgtcgctcacttgtttggtgaagggtttctatccgagcgatattgcggtagagtgggaatccaacgggcagccagagaacaattacaagacgacgccaccagtgctggattcggatgggagctttttcttgtactcaaagttgaccgtggataaaagccggtggcagcagggtaatgtgttttcatgctcggtaatgcacgaggccctccataaccattatacgcagaaaagcctttcgctctcacccgggaaa

SEQ ID NO: 474 - DNA, 1140 bp, Artificial Sequence
  source: /note="Description of Artificial Sequence: Synthetic polynucleotide"
gcccctacgtcctcctcaactaaaaagacgcaacttcagcttgagcatcttcttctcgaccttcagatgattttgaacggaatcaataattacaaaaatcctaaacttactcagatgctcacgtttaagttttatatgccaaaaaaggccactgagttgaaacaccttcaatgcttggaggaggaacttaaaccacttgaggaagccttgaatcttgctccgtccaaaaactttcatttgcggccacgagatctgataagcaacatcaacgtgagcgtcctggaactgaaaggaagcgaaacgacgtttatgtgcgaatatgcagacgaaactgcgacaatcgttgaatttctcaatcgatggatcacttttagccaatctatcatcagcacgttgactggtggtggaggatcgggaggtggaggatctggaggaggaggatcgggtggaggaggatccgataaaactcatacgtgcccaccctgccccgcaccggaggcagcagggggtccttccgtattcttgtttccgccgaagccgaaggacacgcttatgattagcaggactcccgaagtgacgtgcgtcgtagtcgacgtgtcgcatgaggacccggaggtcaagttcaactggtatgtcgatggcgtagaagtacacaatgcaaagactaaaccccgcgaagaacagtacaattcgacatacagagtagtgagcgtcttgactgtgctgcaccaggactggctcaacggaaaggagtataagtgtaaagtatcgaataaggcacttggtgcacctatcgagaaaacgatctccaaggctaagggtcagccaagagaaccccaagtctacactctgccccctagccgcgacgagcttacgaaaaaccaggtgtcgctcacttgtttggtgaagggtttctatccgagcgatattgcggtagagtgggaatccaacgggcagccagagaacaattacaagacgacgccaccagtgctggattcggatgggagctttttcttgtactcaaagttgaccgtggataaaagccggtggcagcagggtaatgtgttttcatgctcggtaatgcacgaggccctccataaccattatacgcagaaaagcctttcgctctcacccgggaaa

SEQ ID NO: 475 - DNA, 1140 bp, Artificial Sequence
  source: /note="Description of Artificial Sequence: Synthetic polynucleotide"
gcccctacgtcctcctcaactaaaaagacgcaacttcagcttgagcatcttcttctcgaccttcagatgattttgaacggaatcaataattacaaaaatcctaaacttactaacatgctcacgtttaagttttatatgccaaaaaaggccactgagttgaaacaccttcaatgcttggaggaggaacttaaaccacttgaggaagccttgaatcttgctccgtccaaaaactttcatttgcggccacgagatctgataagcaacatcaacgtgatcgtcctggaactgaaaggaagcgaaacgacgtttatgtgcgaatatgcagacgaaactgcgacaatcgttgaatttctcaatcgatggatcacttttagccaatctatcatcagcacgttgactggtggtggaggatcgggaggtggaggatctggaggaggaggatcgggtggaggaggatccgataaaactcatacgtgcccaccctgccccgcaccggaggcagcagggggtccttccgtattcttgtttccgccgaagccgaaggacacgcttatgattagcaggactcccgaagtgacgtgcgtcgtagtcgacgtgtcgcatgaggacccggaggtcaagttcaactggtatgtcgatggcgtagaagtacacaatgcaaagactaaaccccgcgaagaacagtacaattcgacatacagagtagtgagcgtcttgactgtgctgcaccaggactggctcaacggaaaggagtataagtgtaaagtatcgaataaggcacttggtgcacctatcgagaaaacgatctccaaggctaagggtcagccaagagaaccccaagtctacactctgccccctagccgcgacgagcttacgaaaaaccaggtgtcgctcacttgtttggtgaagggtttctatccgagcgatattgcggtagagtgggaatccaacgggcagccagagaacaattacaagacgacgccaccagtgctggattcggatgggagctttttcttgtactcaaagttgaccgtggataaaagccggtggcagcagggtaatgtgttttcatgctcggtaatgcacgaggccctccataaccattatacgcagaaaagcctttcgctctcacccgggaaa

SEQ ID NO: 476 - DNA, 1140 bp, Artificial Sequence
  source: /note="Description of Artificial Sequence: Synthetic polynucleotide"
gcccctacgtcctcctcaactaaaaagacgcaacttcagcttgagaaccttcttctcgaccttcagatgattttgaacggaatcaataattacaaaaatcctaaacttactaacatgctcacgtttaagttttatatgccaaaaaaggccactgagttgaaacaccttcaatgcttggaggaggaacttaaaccacttgaggaagccttgaatcttgctccgtccaaaaactttcatttgcggccacgagatctgataagcaacatcaacgtgatcgtcctggaactgaaaggaagcgaaacgacgtttatgtgcgaatatgcagacgaaactgcgacaatcgttgaatttctcaatcgatggatcacttttagccaatctatcatcagcacgttgactggtggtggaggatcgggaggtggaggatctggaggaggaggatcgggtggaggaggatccgataaaactcatacgtgcccaccctgccccgcaccggaggcagcagggggtccttccgtattcttgtttccgccgaagccgaaggacacgcttatgattagcaggactcccgaagtgacgtgcgtcgtagtcgacgtgtcgcatgaggacccggaggtcaagttcaactggtatgtcgatggcgtagaagtacacaatgcaaagactaaaccccgcgaagaacagtacaattcgacatacagagtagtgagcgtcttgactgtgctgcaccaggactggctcaacggaaaggagtataagtgtaaagtatcgaataaggcacttggtgcacctatcgagaaaacgatctccaaggctaagggtcagccaagagaaccccaagtctacactctgccccctagccgcgacgagcttacgaaaaaccaggtgtcgctcacttgtttggtgaagggtttctatccgagcgatattgcggtagagtgggaatccaacgggcagccagagaacaattacaagacgacgccaccagtgctggattcggatgggagctttttcttgtactcaaagttgaccgtggataaaagccggtggcagcagggtaatgtgttttcatgctcggtaatgcacgaggccctccataaccattatacgcagaaaagcctttcgctctcacccgggaaa

SEQ ID NO: 477 - DNA, 1140 bp, Artificial Sequence
  source: /note="Description of Artificial Sequence: Synthetic polynucleotide"
gcccctacgtcctcctcaactaaaaagacgcaacttcagcttgagttgcttcttctcgaccttcagatgattttgaacggaatcaataattacaaaaatcctaaacttactaacatgctcacgtttaagttttatatgccaaaaaaggccactgagttgaaacaccttcaatgcttggaggaggaacttaaaccacttgaggaagccttgaatcttgctccgtccaaaaactttcatttgcggccacgagatctgataagcaacatcaacgtgatcgtcctggaactgaaaggaagcgaaacgacgtttatgtgcgaatatgcagacgaaactgcgacaatcgttgaatttctcaatcgatggatcacttttagccaatctatcatcagcacgttgactggtggtggaggatcgggaggtggaggatctggaggaggaggatcgggtggaggaggatccgataaaactcatacgtgcccaccctgccccgcaccggaggcagcagggggtccttccgtattcttgtttccgccgaagccgaaggacacgcttatgattagcaggactcccgaagtgacgtgcgtcgtagtcgacgtgtcgcatgaggacccggaggtcaagttcaactggtatgtcgatggcgtagaagtacacaatgcaaagactaaaccccgcgaagaacagtacaattcgacatacagagtagtgagcgtcttgactgtgctgcaccaggactggctcaacggaaaggagtataagtgtaaagtatcgaataaggcacttggtgcacctatcgagaaaacgatctccaaggctaagggtcagccaagagaaccccaagtctacactctgccccctagccgcgacgagcttacgaaaaaccaggtgtcgctcacttgtttggtgaagggtttctatccgagcgatattgcggtagagtgggaatccaacgggcagccagagaacaattacaagacgacgccaccagtgctggattcggatgggagctttttcttgtactcaaagttgaccgtggataaaagccggtggcagcagggtaatgtgttttcatgctcggtaatgcacgaggccctccataaccattatacgcagaaaagcctttcgctctcacccgggaaa

SEQ ID NO: 478 - DNA, 1140 bp, Artificial Sequence
  source: /note="Description of Artificial Sequence: Synthetic polynucleotide"
gcccctacgtcctcctcaactaaaaagacgcaacttcagcttgagcatcttcttctcgaccttcagatgattttgaacggaatcaataattacaaaaatcctaaacttactaacatgctcacgtttaagttttatatgccaaaaaaggccactgagttgaaacaccttcaatgcttggaggaggaacttaaaccacttgaggaagccttgaatcttgctccgtccaaaaactttcatttgcggccacgagtcctgataagcaacatcaacgtgatcgtcctggaactgaaaggaagcgaaacgacgtttatgtgcgaatatgcagacgaaactgcgacaatcgttgaatttctcaatcgatggatcacttttagccaatctatcatcagcacgttgactggtggtggaggatcgggaggtggaggatctggaggaggaggatcgggtggaggaggatccgataaaactcatacgtgcccaccctgccccgcaccggaggcagcagggggtccttccgtattcttgtttccgccgaagccgaaggacacgcttatgattagcaggactcccgaagtgacgtgcgtcgtagtcgacgtgtcgcatgaggacccggaggtcaagttcaactggtatgtcgatggcgtagaagtacacaatgcaaagactaaaccccgcgaagaacagtacaattcgacatacagagtagtgagcgtcttgactgtgctgcaccaggactggctcaacggaaaggagtataagtgtaaagtatcgaataaggcacttggtgcacctatcgagaaaacgatctccaaggctaagggtcagccaagagaaccccaagtctacactctgccccctagccgcgacgagcttacgaaaaaccaggtgtcgctcacttgtttggtgaagggtttctatccgagcgatattgcggtagagtgggaatccaacgggcagccagagaacaattacaagacgacgccaccagtgctggattcggatgggagctttttcttgtactcaaagttgaccgtggataaaagccggtggcagcagggtaatgtgttttcatgctcggtaatgcacgaggccctccataaccattatacgcagaaaagcctttcgctctcacccgggaaa

SEQ ID NO: 479 - DNA, 1140 bp, Artificial Sequence
  source: /note="Description of Artificial Sequence: Synthetic polynucleotide"
gcccctacgtcctcctcaactaaaaagacgcaacttcagcttgagcatcttcttctcgaccttcagatgattttgaacggaatcaataattacaaaaatcctaaacttactaacatgctcacgtttaagttttatatgccaaaaaaggccactgagttgaaacaccttcaatgcttggaggaggaacttaaaccacttgaggaagccttgaatcttgctccgtccaaaaactttcatttgcggccacgagatctgataagcaacatcaacgtgagcgtcctggaactgaaaggaagcgaaacgacgtttatgtgcgaatatgcagacgaaactgcgacaatcgttgaatttctcaatcgatggatcacttttagccaatctatcatcagcacgttgactggtggtggaggatcgggaggtggaggatctggaggaggaggatcgggtggaggaggatccgataaaactcatacgtgcccaccctgccccgcaccggaggcagcagggggtccttccgtattcttgtttccgccgaagccgaaggacacgcttatgattagcaggactcccgaagtgacgtgcgtcgtagtcgacgtgtcgcatgaggacccggaggtcaagttcaactggtatgtcgatggcgtagaagtacacaatgcaaagactaaaccccgcgaagaacagtacaattcgacatacagagtagtgagcgtcttgactgtgctgcaccaggactggctcaacggaaaggagtataagtgtaaagtatcgaataaggcacttggtgcacctatcgagaaaacgatctccaaggctaagggtcagccaagagaaccccaagtctacactctgccccctagccgcgacgagcttacgaaaaaccaggtgtcgctcacttgtttggtgaagggtttctatccgagcgatattgcggtagagtgggaatccaacgggcagccagagaacaattacaagacgacgccaccagtgctggattcggatgggagctttttcttgtactcaaagttgaccgtggataaaagccggtggcagcagggtaatgtgttttcatgctcggtaatgcacgaggccctccataaccattatacgcagaaaagcctttcgctctcacccgggaaa

SEQ ID NO: 480 - DNA, 1140 bp, Artificial Sequence
  source: /note="Description of Artificial Sequence: Synthetic polynucleotide"
gcccctacgtcctcctcaactaaaaagacgcaacttcagcttgagcatcttcttctcgaccttcagatgattttgaacggaatcaataattacaaaaatcctaaacttactgaaatgctcacgtttaagttttatatgccaaaaaaggccactgagttgaaacaccttcaatgcttggaggaggaacttaaaccacttgaggaagccttgaatcttgctccgtccaaaaactttcatttgcggccacgagatctgataagcaacatcaacgtgatcgtcctggaactgaaaggaagcgaaacgacgtttatgtgcgaatatgcagacgaaactgcgacaatcgttgaatttctcaatcgatggatcacttttagccaatctatcatcagcacgttgactggtggtggaggatcgggaggtggaggatctggaggaggaggatcgggtggaggaggatccgataaaactcatacgtgcccaccctgccccgcaccggaggcagcagggggtccttccgtattcttgtttccgccgaagccgaaggacacgcttatgattagcaggactcccgaagtgacgtgcgtcgtagtcgacgtgtcgcatgaggacccggaggtcaagttcaactggtatgtcgatggcgtagaagtacacaatgcaaagactaaaccccgcgaagaacagtacaattcgacatacagagtagtgagcgtcttgactgtgctgcaccaggactggctcaacggaaaggagtataagtgtaaagtatcgaataaggcacttggtgcacctatcgagaaaacgatctccaaggctaagggtcagccaagagaaccccaagtctacactctgccccctagccgcgacgagcttacgaaaaaccaggtgtcgctcacttgtttggtgaagggtttctatccgagcgatattgcggtagagtgggaatccaacgggcagccagagaacaattacaagacgacgccaccagtgctggattcggatgggagctttttcttgtactcaaagttgaccgtggataaaagccggtggcagcagggtaatgtgttttcatgctcggtaatgcacgaggccctccataaccattatacgcagaaaagcctttcgctctcacccgggaaa

SEQ ID NO: 481 - DNA, 1140 bp, Artificial Sequence
  source: /note="Description of Artificial Sequence: Synthetic polynucleotide"
gcccctacgtcctcctcaactaaaaagacgcaacttcagcttgagcatcttcttctcgaccttcagatgattttgaacggaatcaataattacaaaaatcctaaacttactagaatgctcacgaagaagttttatatgccaaaaaaggccactgagttgaaacaccttcaatgcttggaggaggaacttaaaccacttgaggaagccttgaatcttgctccgtccaaaaactttcatttgcggccacgagatctgataagcaacatcaacgtgatcgtcctggaactgaaaggaagcgaaacgacgtttatgtgcgaatatgcagacgaaactgcgacaatcgttgaatttctcaatcgatggatcacttttagccaatctatcatcagcacgttgactggtggtggaggatcgggaggtggaggatctggaggaggaggatcgggtggaggaggatccgataaaactcatacgtgcccaccctgccccgcaccggaggcagcagggggtccttccgtattcttgtttccgccgaagccgaaggacacgcttatgattagcaggactcccgaagtgacgtgcgtcgtagtcgacgtgtcgcatgaggacccggaggtcaagttcaactggtatgtcgatggcgtagaagtacacaatgcaaagactaaaccccgcgaagaacagtacaattcgacatacagagtagtgagcgtcttgactgtgctgcaccaggactggctcaacggaaaggagtataagtgtaaagtatcgaataaggcacttggtgcacctatcgagaaaacgatctccaaggctaagggtcagccaagagaaccccaagtctacactctgccccctagccgcgacgagcttacgaaaaaccaggtgtcgctcacttgtttggtgaagggtttctatccgagcgatattgcggtagagtgggaatccaacgggcagccagagaacaattacaagacgacgccaccagtgctggattcggatgggagctttttcttgtactcaaagttgaccgtggataaaagccggtggcagcagggtaatgtgttttcatgctcggtaatgcacgaggccctccataaccattatacgcagaaaagcctttcgctctcacccgggaaa

SEQ ID NO: 482 - DNA, 1140 bp, Artificial Sequence
  source: /note="Description of Artificial Sequence: Synthetic polynucleotide"
gcccctacgtcctcctcaactaaaaagacgcaacttcagcttgagcatcttcttctcgaccttcagatgattttgaacggaatcaataattacaaaaatcctaaacttactagaatgctcacgcagaagttttatatgccaaaaaaggccactgagttgaaacaccttcaatgcttggaggaggaacttaaaccacttgaggaagccttgaatcttgctccgtccaaaaactttcatttgcggccacgagatctgataagcaacatcaacgtgatcgtcctggaactgaaaggaagcgaaacgacgtttatgtgcgaatatgcagacgaaactgcgacaatcgttgaatttctcaatcgatggatcacttttagccaatctatcatcagcacgttgactggtggtggaggatcgggaggtggaggatctggaggaggaggatcgggtggaggaggatccgataaaactcatacgtgcccaccctgccccgcaccggaggcagcagggggtccttccgtattcttgtttccgccgaagccgaaggacacgcttatgattagcaggactcccgaagtgacgtgcgtcgtagtcgacgtgtcgcatgaggacccggaggtcaagttcaactggtatgtcgatggcgtagaagtacacaatgcaaagactaaaccccgcgaagaacagtacaattcgacatacagagtagtgagcgtcttgactgtgctgcaccaggactggctcaacggaaaggagtataagtgtaaagtatcgaataaggcacttggtgcacctatcgagaaaacgatctccaaggctaagggtcagccaagagaaccccaagtctacactctgccccctagccgcgacgagcttacgaaaaaccaggtgtcgctcacttgtttggtgaagggtttctatccgagcgatattgcggtagagtgggaatccaacgggcagccagagaacaattacaagacgacgccaccagtgctggattcggatgggagctttttcttgtactcaaagttgaccgtggataaaagccggtggcagcagggtaatgtgttttcatgctcggtaatgcacgaggccctccataaccattatacgcagaaaagcctttcgctctcacccgggaaa

SEQ ID NO: 483 - DNA, 1140 bp, Artificial Sequence
  source: /note="Description of Artificial Sequence: Synthetic polynucleotide"
gcccctacgtcctcctcaactaaaaagacgcaacttcagcttgagcatcttcttctcgaccttcagatgattttgaacggaatcaataattacaaaaatcctaaacttactagaatgctcacggcaaagtttgctatgccaaaaaaggccactgagttgaaacaccttcaatgcttggaggaggaacttaaaccacttgaggaagccttgaatggtgctccgtccaaaaactttcatttgcggccacgagatctgataagcgatatcaacgtgatcgtcctggaactgaaaggaagcgaaacgacgtttatgtgcgaatatgcagacgaaactgcgacaatcgttgaatttctcaatcgatggatcacttttagccaatctatcatcagcacgttgactggtggtggaggatcgggaggtggaggatctggaggaggaggatcgggtggaggaggatccgataaaactcatacgtgcccaccctgccccgcaccggaggcagcagggggtccttccgtattcttgtttccgccgaagccgaaggacacgcttatgattagcaggactcccgaagtgacgtgcgtcgtagtcgacgtgtcgcatgaggacccggaggtcaagttcaactggtatgtcgatggcgtagaagtacacaatgcaaagactaaaccccgcgaagaacagtacaattcgacatacagagtagtgagcgtcttgactgtgctgcaccaggactggctcaacggaaaggagtataagtgtaaagtatcgaataaggcacttggtgcacctatcgagaaaacgatctccaaggctaagggtcagccaagagaaccccaagtctacactctgccccctagccgcgacgagcttacgaaaaaccaggtgtcgctcacttgtttggtgaagggtttctatccgagcgatattgcggtagagtgggaatccaacgggcagccagagaacaattacaagacgacgccaccagtgctggattcggatgggagctttttcttgtactcaaagttgaccgtggataaaagccggtggcagcagggtaatgtgttttcatgctcggtaatgcacgaggccctccataaccattatacgcagaaaagcctttcgctctcacccgggaaa

SEQ ID NO: 484 - DNA, 1140 bp, Artificial Sequence
  source: /note="Description of Artificial Sequence: Synthetic polynucleotide"
gcccctacgtcctcctcaactaaaaagacgcaacttcagcttgagcatcttcttctcgaccttcagatgattttgaacggaatcaataattacaaaaatcctaaacttactaacatgctcacgtttaagttttatatgccaaaaaaggccactgagttgaaacaccttcaatgcttggaggaggaacttaaaccacttgaggaagccttgaatcttgctccgtccaaaaactttcatttgcggccacgagatctgataaggaacatcaacgtgatcgtcctggaactgaaaggaagcgaaacgacgtttatgtgcgaatatgcagacgaaactgcgacaatcgttgaatttctcaatcgatggatcacttttagccaatctatcatcagcacgttgactggtggtggaggatcgggaggtggaggatctggaggaggaggatcgggtggaggaggatccgataaaactcatacgtgcccaccctgccccgcaccggaggcagcagggggtccttccgtattcttgtttccgccgaagccgaaggacacgcttatgattagcaggactcccgaagtgacgtgcgtcgtagtcgacgtgtcgcatgaggacccggaggtcaagttcaactggtatgtcgatggcgtagaagtacacaatgcaaagactaaaccccgcgaagaacagtacaattcgacatacagagtagtgagcgtcttgactgtgctgcaccaggactggctcaacggaaaggagtataagtgtaaagtatcgaataaggcacttggtgcacctatcgagaaaacgatctccaaggctaagggtcagccaagagaaccccaagtctacactctgccccctagccgcgacgagcttacgaaaaaccaggtgtcgctcacttgtttggtgaagggtttctatccgagcgatattgcggtagagtgggaatccaacgggcagccagagaacaattacaagacgacgccaccagtgctggattcggatgggagctttttcttgtactcaaagttgaccgtggataaaagccggtggcagcagggtaatgtgttttcatgctcggtaatgcacgaggccctccataaccattatacgcagaaaagcctttcgctctcacccgggaaa

SEQ ID NO: 485 - DNA, 1140 bp, Artificial Sequence
  source: /note="Description of Artificial Sequence: Synthetic polynucleotide"
gcccctacgtcctcctcaactaaaaagacgcaacttcagcttgagaaccttcttctcgaccttcagatgattttgaacggaatcaataattacaaaaatcctaaacttactgaaatgctcacgtttaagttttatatgccaaaaaaggccactgagttgaaacaccttcaatgcttggaggaggaacttaaaccacttgaggaagccttgaatcttgctccgtccaaaaactttcatttgcggccacgagatctgataagcaacatcaacgtgatcgtcctggaactgaaaggaagcgaaacgacgtttatgtgcgaatatgcagacgaaactgcgacaatcgttgaatttctcaatcgatggatcacttttagccaatctatcatcagcacgttgactggtggtggaggatcgggaggtggaggatctggaggaggaggatcgggtggaggaggatccgataaaactcatacgtgcccaccctgccccgcaccggaggcagcagggggtccttccgtattcttgtttccgccgaagccgaaggacacgcttatgattagcaggactcccgaagtgacgtgcgtcgtagtcgacgtgtcgcatgaggacccggaggtcaagttcaactggtatgtcgatggcgtagaagtacacaatgcaaagactaaaccccgcgaagaacagtacaattcgacatacagagtagtgagcgtcttgactgtgctgcaccaggactggctcaacggaaaggagtataagtgtaaagtatcgaataaggcacttggtgcacctatcgagaaaacgatctccaaggctaagggtcagccaagagaaccccaagtctacactctgccccctagccgcgacgagcttacgaaaaaccaggtgtcgctcacttgtttggtgaagggtttctatccgagcgatattgcggtagagtgggaatccaacgggcagccagagaacaattacaagacgacgccaccagtgctggattcggatgggagctttttcttgtactcaaagttgaccgtggataaaagccggtggcagcagggtaatgtgttttcatgctcggtaatgcacgaggccctccataaccattatacgcagaaaagcctttcgctctcacccgggaaa

SEQ ID NO: 486 - DNA, 1140 bp, Artificial Sequence
  source: /note="Description of Artificial Sequence: Synthetic polynucleotide"
gcccctacgtcctcctcaactaaaaagacgcaacttcagcttgagcatcttcttctcgaccttcagatgattttgaacggaatcaataattacaaaaatcctaaacttactgaaatgctcacgtttaagttttatatgccaaaaaaggccactgagttgaaacaccttcaatgcttggaggaggaacttaaaccacttgaggaagccttgaatcttgctccgtccaaaaactttcatttgcggccacgagtcctgataagcaacatcaacgtgatcgtcctggaactgaaaggaagcgaaacgacgtttatgtgcgaatatgcagacgaaactgcgacaatcgttgaatttctcaatcgatggatcacttttagccaatctatcatcagcacgttgactggtggtggaggatcgggaggtggaggatctggaggaggaggatcgggtggaggaggatccgataaaactcatacgtgcccaccctgccccgcaccggaggcagcagggggtccttccgtattcttgtttccgccgaagccgaaggacacgcttatgattagcaggactcccgaagtgacgtgcgtcgtagtcgacgtgtcgcatgaggacccggaggtcaagttcaactggtatgtcgatggcgtagaagtacacaatgcaaagactaaaccccgcgaagaacagtacaattcgacatacagagtagtgagcgtcttgactgtgctgcaccaggactggctcaacggaaaggagtataagtgtaaagtatcgaataaggcacttggtgcacctatcgagaaaacgatctccaaggctaagggtcagccaagagaaccccaagtctacactctgccccctagccgcgacgagcttacgaaaaaccaggtgtcgctcacttgtttggtgaagggtttctatccgagcgatattgcggtagagtgggaatccaacgggcagccagagaacaattacaagacgacgccaccagtgctggattcggatgggagctttttcttgtactcaaagttgaccgtggataaaagccggtggcagcagggtaatgtgttttcatgctcggtaatgcacgaggccctccataaccattatacgcagaaaagcctttcgctctcacccgggaaa

SEQ ID NO: 487 - DNA, 1140 bp, Artificial Sequence
  source: /note="Description of Artificial Sequence: Synthetic polynucleotide"
gcccctacgtcctcctcaactaaaaagacgcaacttcagcttgagcatcttcttctcgaccttcagatgattttgaacggaatcaataattacaaaaatcctaaacttactgaaatgctcacgtttaagttttatatgccaaaaaaggccactgagttgaaacaccttcaatgcttggaggaggaacttaaaccacttgaggaagccttgaatcttgctccgtccaaaaactttcatttgcggccacgagatctgataaggaacatcaacgtgatcgtcctggaactgaaaggaagcgaaacgacgtttatgtgcgaatatgcagacgaaactgcgacaatcgttgaatttctcaatcgatggatcacttttagccaatctatcatcagcacgttgactggtggtggaggatcgggaggtggaggatctggaggaggaggatcgggtggaggaggatccgataaaactcatacgtgcccaccctgccccgcaccggaggcagcagggggtccttccgtattcttgtttccgccgaagccgaaggacacgcttatgattagcaggactcccgaagtgacgtgcgtcgtagtcgacgtgtcgcatgaggacccggaggtcaagttcaactggtatgtcgatggcgtagaagtacacaatgcaaagactaaaccccgcgaagaacagtacaattcgacatacagagtagtgagcgtcttgactgtgctgcaccaggactggctcaacggaaaggagtataagtgtaaagtatcgaataaggcacttggtgcacctatcgagaaaacgatctccaaggctaagggtcagccaagagaaccccaagtctacactctgccccctagccgcgacgagcttacgaaaaaccaggtgtcgctcacttgtttggtgaagggtttctatccgagcgatattgcggtagagtgggaatccaacgggcagccagagaacaattacaagacgacgccaccagtgctggattcggatgggagctttttcttgtactcaaagttgaccgtggataaaagccggtggcagcagggtaatgtgttttcatgctcggtaatgcacgaggccctccataaccattatacgcagaaaagcctttcgctctcacccgggaaa

SEQ ID NO: 488 - DNA, 1140 bp, Artificial Sequence
  source: /note="Description of Artificial Sequence: Synthetic polynucleotide"
gcccctacgtcctcctcaactaaaaagacgcaacttcagcttgagcatcttcttctcgaccttcagatgattttgaacggaatcaataattacaaaaatcctaaacttactgaaatgctcacgtttaagttttatatgccaaaaaaggccactgagttgaaacaccttcaatgcttggaggaggaacttaaaccacttgaggaagccttgaatcttgctccgtccaaaaactttcatttgcggccacgagatctgataagcaacatcaacgtgagcgtcctggaactgaaaggaagcgaaacgacgtttatgtgcgaatatgcagacgaaactgcgacaatcgttgaatttctcaatcgatggatcacttttagccaatctatcatcagcacgttgactggtggtggaggatcgggaggtggaggatctggaggaggaggatcgggtggaggaggatccgataaaactcatacgtgcccaccctgccccgcaccggaggcagcagggggtccttccgtattcttgtttccgccgaagccgaaggacacgcttatgattagcaggactcccgaagtgacgtgcgtcgtagtcgacgtgtcgcatgaggacccggaggtcaagttcaactggtatgtcgatggcgtagaagtacacaatgcaaagactaaaccccgcgaagaacagtacaattcgacatacagagtagtgagcgtcttgactgtgctgcaccaggactggctcaacggaaaggagtataagtgtaaagtatcgaataaggcacttggtgcacctatcgagaaaacgatctccaaggctaagggtcagccaagagaaccccaagtctacactctgccccctagccgcgacgagcttacgaaaaaccaggtgtcgctcacttgtttggtgaagggtttctatccgagcgatattgcggtagagtgggaatccaacgggcagccagagaacaattacaagacgacgccaccagtgctggattcggatgggagctttttcttgtactcaaagttgaccgtggataaaagccggtggcagcagggtaatgtgttttcatgctcggtaatgcacgaggccctccataaccattatacgcagaaaagcctttcgctctcacccgggaaa

SEQ ID NO: 489 - DNA, 1140 bp, Artificial Sequence
  source: /note="Description of Artificial Sequence: Synthetic polynucleotide"
gcccctacgtcctcctcaactaaaaagacgcaacttcagcttgagaaccttcttctcgaccttcagatgattttgaacggaatcaataattacaaaaatcctaaacttactagaatgctcacgcagaagttttatatgccaaaaaaggccactgagttgaaacaccttcaatgcttggaggaggaacttaaaccacttgaggaagccttgaatcttgctccgtccaaaaactttcatttgcggccacgagatctgataagcaacatcaacgtgatcgtcctggaactgaaaggaagcgaaacgacgtttatgtgcgaatatgcagacgaaactgcgacaatcgttgaatttctcaatcgatggatcacttttagccaatctatcatcagcacgttgactggtggtggaggatcgggaggtggaggatctggaggaggaggatcgggtggaggaggatccgataaaactcatacgtgcccaccctgccccgcaccggaggcagcagggggtccttccgtattcttgtttccgccgaagccgaaggacacgcttatgattagcaggactcccgaagtgacgtgcgtcgtagtcgacgtgtcgcatgaggacccggaggtcaagttcaactggtatgtcgatggcgtagaagtacacaatgcaaagactaaaccccgcgaagaacagtacaattcgacatacagagtagtgagcgtcttgactgtgctgcaccaggactggctcaacggaaaggagtataagtgtaaagtatcgaataaggcacttggtgcacctatcgagaaaacgatctccaaggctaagggtcagccaagagaaccccaagtctacactctgccccctagccgcgacgagcttacgaaaaaccaggtgtcgctcacttgtttggtgaagggtttctatccgagcgatattgcggtagagtgggaatccaacgggcagccagagaacaattacaagacgacgccaccagtgctggattcggatgggagctttttcttgtactcaaagttgaccgtggataaaagccggtggcagcagggtaatgtgttttcatgctcggtaatgcacgaggccctccataaccattatacgcagaaaagcctttcgctctcacccgggaaa

SEQ ID NO: 490 - DNA, 1140 bp, Artificial Sequence
  source: /note="Description of Artificial Sequence: Synthetic polynucleotide"
gcccctacgtcctcctcaactaaaaagacgcaacttcagcttgagcatcttcttctcgaccttcagatgattttgaacggaatcaataattacaaaaatcctaaacttactagaatgctcacgcagaagttttatatgccaaaaaaggccactgagttgaaacaccttcaatgcttggaggaggaacttaaaccacttgaggaagccttgaatcttgctccgtccaaaaactttcatttgcggccacgagatctgataagcaacatcaacgtgagcgtcctggaactgaaaggaagcgaaacgacgtttatgtgcgaatatgcagacgaaactgcgacaatcgttgaatttctcaatcgatggatcacttttagccaatctatcatcagcacgttgactggtggtggaggatcgggaggtggaggatctggaggaggaggatcgggtggaggaggatccgataaaactcatacgtgcccaccctgccccgcaccggaggcagcagggggtccttccgtattcttgtttccgccgaagccgaaggacacgcttatgattagcaggactcccgaagtgacgtgcgtcgtagtcgacgtgtcgcatgaggacccggaggtcaagttcaactggtatgtcgatggcgtagaagtacacaatgcaaagactaaaccccgcgaagaacagtacaattcgacatacagagtagtgagcgtcttgactgtgctgcaccaggactggctcaacggaaaggagtataagtgtaaagtatcgaataaggcacttggtgcacctatcgagaaaacgatctccaaggctaagggtcagccaagagaaccccaagtctacactctgccccctagccgcgacgagcttacgaaaaaccaggtgtcgctcacttgtttggtgaagggtttctatccgagcgatattgcggtagagtgggaatccaacgggcagccagagaacaattacaagacgacgccaccagtgctggattcggatgggagctttttcttgtactcaaagttgaccgtggataaaagccggtggcagcagggtaatgtgttttcatgctcggtaatgcacgaggccctccataaccattatacgcagaaaagcctttcgctctcacccgggaaa

SEQ ID NO: 491 - DNA, 1140 bp, Artificial Sequence
  source: /note="Description of Artificial Sequence: Synthetic polynucleotide"
gcccctacgtcctcctcaactaaaaagacgcaacttcagcttgagaaccttcttctcgaccttcagatgattttgaacggaatcaataattacaaaaatcctgaacttactaacatgctcacgtttaagttttatatgccaaaaaaggccactgagttgaaacaccttcaatgcttggaggaggaacttaaaccacttgaggaagccttgaatcttgctccgtccaaaaactttcatttgcggccacgagatctgataagcaacatcaacgtgatcgtcctggaactgaaaggaagcgaaacgacgtttatgtgcgaatatgcagacgaaactgcgacaatcgttgaatttctcaatcgatggatcacttttagccaatctatcatcagcacgttgactggtggtggaggatcgggaggtggaggatctggaggaggaggatcgggtggaggaggatccgataaaactcatacgtgcccaccctgccccgcaccggaggcagcagggggtccttccgtattcttgtttccgccgaagccgaaggacacgcttatgattagcaggactcccgaagtgacgtgcgtcgtagtcgacgtgtcgcatgaggacccggaggtcaagttcaactggtatgtcgatggcgtagaagtacacaatgcaaagactaaaccccgcgaagaacagtacaattcgacatacagagtagtgagcgtcttgactgtgctgcaccaggactggctcaacggaaaggagtataagtgtaaagtatcgaataaggcacttggtgcacctatcgagaaaacgatctccaaggctaagggtcagccaagagaaccccaagtctacactctgccccctagccgcgacgagcttacgaaaaaccaggtgtcgctcacttgtttggtgaagggtttctatccgagcgatattgcggtagagtgggaatccaacgggcagccagagaacaattacaagacgacgccaccagtgctggattcggatgggagctttttcttgtactcaaagttgaccgtggataaaagccggtggcagcagggtaatgtgttttcatgctcggtaatgcacgaggccctccataaccattatacgcagaaaagcctttcgctctcacccgggaaa

SEQ ID NO: 492 - DNA, 1140 bp, Artificial Sequence
  source: /note="Description of Artificial Sequence: Synthetic polynucleotide"
gcccctacgtcctcctcaactaaaaagacgcaacttcagcttgagcatcttcttctcgaccttcagatgattttgaacggaatcaataattacaaaaatcctaaacttactagaatgctcacgtttaagttttatatgccaaaaaaggccactgagttgaaacaccttcaatgcttggaggaggaacttaaaccacttgaggaagtattgaatcttgctcagtccaaaaactttcatttgcggccacgagatctgataagcaacatcaacgtgatcgtcctggaactgaaaggaagcgaaacgacgtttatgtgcgaatatgcagacgaaactgcgacaatcgttgaatttctcaatcgatggatcacttttagccaatctatcatcagcacgttgactggtggtggaggatcgggaggtggaggatctggaggaggaggatcgggtggaggaggatccgataaaactcatacgtgcccaccctgccccgcaccggagctgcttgggggtccttccgtattcttgtttccgccgaagccgaaggacacgcttatgattagcaggactcccgaagtgacgtgcgtcgtagtcgacgtgtcgcatgaggacccggaggtcaagttcaactggtatgtcgatggcgtagaagtacacaatgcaaagactaaaccccgcgaagaacagtacggttcgacatacagagtagtgagcgtcttgcaggtgctgcacgttgactggctcaacggaaaggagtataagtgtaaagtatcgaataaggcacttcccgcacctatcgagaaaacgatctccaaggctaagggtcagccaagagaaccccaagtctacactctgccccctagccgcgacgagcttacgaaaaaccaggtgtcgctcacttgtttggtgaagggtttctatccgagcgatattgtggtagagtgggaatccaacgggcagccagagaacaattacaagacgacgccaccagtgctggattcggatgggagctttttcttgtactcaaagttgaccgtggataaaagccggtggcagcagggtaatgtgttttcatgctcggtaatgcacgaggccctccataaccattatacgcagaaaagcctttcgctctcacccgggaaa

SEQ ID NO: 493 - DNA, 1140 bp, Artificial Sequence
  source: /note="Description of Artificial Sequence: Synthetic polynucleotide"
gcccctacgtcctcctcaactaaaaagacgcaacttcagcttgagcatcttcttctcgaccttcagatgattttgaacggaatcaataattacaaaaatcctaaacttactagaatgctcacgtttaagttttatatgccaaaaaaggccactgagttgaaacaccttcaatgcttggaggaggaacttaaaccacttgaggaagccttgaatcttgctccgtccaaaaactttcatttgcggccacgagatctgataagcaacatcaacgtgatcgtcctggaactgaaaggaagcgaaacgacgtttatgtgcgaatatgcagacgaaactgcgacaatcgttgaatttctcaatcgatggatcacttttagccaatctatcatcagcacgttgactggtggtggaggatcgggaggtggaggatctggaggaggaggatcgggtggaggaggatccgataaaactcatacgtgcccaccctgccccgcaccggagctgcttgggggtccttccgtattcttgtttccgccgaagccgaaggacacgcttatgattagcaggactcccgaagtgacgtgcgtcgtagtcgacgtgtcgcatgaggacccggaggtcaagttcaactggtatgtcgatggcgtagaagtacacaatgcaaagactaaaccccgcgaagaacagtacggttcgacatacagagtagtgagcgtcttgcaggtgctgcacgttgactggctcaacggaaaggagtataagtgtaaagtatcgaataaggcacttcccgcacctatcgagaaaacgatctccaaggctaagggtcagccaagagaaccccaagtctacactctgccccctagccgcgacgagcttacgaaaaaccaggtgtcgctcacttgtttggtgaagggtttctatccgagcgatattgtggtagagtgggaatccaacgggcagccagagaacaattacaagacgacgccaccagtgctggattcggatgggagctttttcttgtactcaaagttgaccgtggataaaagccggtggcagcagggtaatgtgttttcatgctcggtaatgcacgaggccctccataaccattatacgcagaaaagcctttcgctctcacccgggaaa

SEQ ID NO: 494 - DNA, 1140 bp, Artificial Sequence
  source: /note="Description of Artificial Sequence: Synthetic polynucleotide"
gcccctacgtcctcctcaactaaaaagacgcaacttcagcttgaggatcttcttctcgaccttcagatgattttgaacggaatcaataattacaaaaatcctaaacttactagaatgctcacgtttaagttttatatgccaaaaaaggccactgagttgaaacaccttcaatgcttggaggaggaacttaaaccacttgaggaagccttgaatcttgctccgtccaaaaactttcatttgcggccacgagatctgataagcaacatcaacgtgatcgtcctggaactgaaaggaagcgaaacgacgtttatgtgcgaatatgcagacgaaactgcgacaatcgttgaatttctcaatcgatggatcacttttagccaatctatcatcagcacgttgactggtggtggaggatcgggaggtggaggatctggaggaggaggatcgggtggaggaggatccgataaaactcatacgtgcccaccctgccccgcaccggagctgcttgggggtccttccgtattcttgtttccgccgaagccgaaggacacgcttatgattagcaggactcccgaagtgacgtgcgtcgtagtcgacgtgtcgcatgaggacccggaggtcaagttcaactggtatgtcgatggcgtagaagtacacaatgcaaagactaaaccccgcgaagaacagtacggttcgacatacagagtagtgagcgtcttgcaggtgctgcacgttgactggctcaacggaaaggagtataagtgtaaagtatcgaataaggcacttcccgcacctatcgagaaaacgatctccaaggctaagggtcagccaagagaaccccaagtctacactctgccccctagccgcgacgagcttacgaaaaaccaggtgtcgctcacttgtttggtgaagggtttctatccgagcgatattgtggtagagtgggaatccaacgggcagccagagaacaattacaagacgacgccaccagtgctggattcggatgggagctttttcttgtactcaaagttgaccgtggataaaagccggtggcagcagggtaatgtgttttcatgctcggtaatgcacgaggccctccataaccattatacgcagaaaagcctttcgctctcacccgggaaa

SEQ ID NO: 495 - DNA, 1140 bp, Artificial Sequence
  source: /note="Description of Artificial Sequence: Synthetic polynucleotide"
gcccctacgtcctcctcaactaaaaagacgcaacttcagcttgagaatcttcttctcgaccttcagatgattttgaacggaatcaataattacaaaaatcctaaacttactagaatgctcacgtttaagttttatatgccaaaaaaggccactgagttgaaacaccttcaatgcttggaggaggaacttaaaccacttgaggaagccttgaatcttgctccgtccaaaaactttcatttgcggccacgagatctgataagcaacatcaacgtgatcgtcctggaactgaaaggaagcgaaacgacgtttatgtgcgaatatgcagacgaaactgcgacaatcgttgaatttctcaatcgatggatcacttttagccaatctatcatcagcacgttgactggtggtggaggatcgggaggtggaggatctggaggaggaggatcgggtggaggaggatccgataaaactcatacgtgcccaccctgccccgcaccggagctgcttgggggtccttccgtattcttgtttccgccgaagccgaaggacacgcttatgattagcaggactcccgaagtgacgtgcgtcgtagtcgacgtgtcgcatgaggacccggaggtcaagttcaactggtatgtcgatggcgtagaagtacacaatgcaaagactaaaccccgcgaagaacagtacggttcgacatacagagtagtgagcgtcttgcaggtgctgcacgttgactggctcaacggaaaggagtataagtgtaaagtatcgaataaggcacttcccgcacctatcgagaaaacgatctccaaggctaagggtcagccaagagaaccccaagtctacactctgccccctagccgcgacgagcttacgaaaaaccaggtgtcgctcacttgtttggtgaagggtttctatccgagcgatattgtggtagagtgggaatccaacgggcagccagagaacaattacaagacgacgccaccagtgctggattcggatgggagctttttcttgtactcaaagttgaccgtggataaaagccggtggcagcagggtaatgtgttttcatgctcggtaatgcacgaggccctccataaccattatacgcagaaaagcctttcgctctcacccgggaaa

SEQ ID NO: 496 - DNA, 1140 bp, Artificial Sequence
  source: /note="Description of Artificial Sequence: Synthetic polynucleotide"
gcccctacgtcctcctcaactaaaaagacgcaacttcagcttgagctgcttcttctcgaccttcagatgattttgaacggaatcaataattacaaaaatcctaaacttactagaatgctcacgtttaagttttatatgccaaaaaaggccactgagttgaaacaccttcaatgcttggaggaggaacttaaaccacttgaggaagccttgaatcttgctccgtccaaaaactttcatttgcggccacgagatctgataagcaacatcaacgtgatcgtcctggaactgaaaggaagcgaaacgacgtttatgtgcgaatatgcagacgaaactgcgacaatcgttgaatttctcaatcgatggatcacttttagccaatctatcatcagcacgttgactggtggtggaggatcgggaggtggaggatctggaggaggaggatcgggtggaggaggatccgataaaactcatacgtgcccaccctgccccgcaccggagctgcttgggggtccttccgtattcttgtttccgccgaagccgaaggacacgcttatgattagcaggactcccgaagtgacgtgcgtcgtagtcgacgtgtcgcatgaggacccggaggtcaagttcaactggtatgtcgatggcgtagaagtacacaatgcaaagactaaaccccgcgaagaacagtacggttcgacatacagagtagtgagcgtcttgcaggtgctgcacgttgactggctcaacggaaaggagtataagtgtaaagtatcgaataaggcacttcccgcacctatcgagaaaacgatctccaaggctaagggtcagccaagagaaccccaagtctacactctgccccctagccgcgacgagcttacgaaaaaccaggtgtcgctcacttgtttggtgaagggtttctatccgagcgatattgtggtagagtgggaatccaacgggcagccagagaacaattacaagacgacgccaccagtgctggattcggatgggagctttttcttgtactcaaagttgaccgtggataaaagccggtggcagcagggtaatgtgttttcatgctcggtaatgcacgaggccctccataaccattatacgcagaaaagcctttcgctctcacccgggaaa

SEQ ID NO: 497 - DNA, 1140 bp, Artificial Sequence
  source: /note="Description of Artificial Sequence: Synthetic polynucleotide"
gcccctacgtcctcctcaactaaaaagacgcaacttcagcttgagcatcttcttctcgaccttcagatgattttgaacggaaccaataattacaaaaatcctaaacttactagaatgctcacgtttaagttttatatgccaaaaaaggccactgagttgaaacaccttcaatgcttggaggaggaacttaaaccacttgaggaagccttgaatcttgctccgtccaaaaactttcatttgcggccacgagatctgataagcaacatcaacgtgatcgtcctggaactgaaaggaagcgaaacgacgtttatgtgcgaatatgcagacgaaactgcgacaatcgttgaatttctcaatcgatggatcacttttagccaatctatcatcagcacgttgactggtggtggaggatcgggaggtggaggatctggaggaggaggatcgggtggaggaggatccgataaaactcatacgtgcccaccctgccccgcaccggagctgcttgggggtccttccgtattcttgtttccgccgaagccgaaggacacgcttatgattagcaggactcccgaagtgacgtgcgtcgtagtcgacgtgtcgcatgaggacccggaggtcaagttcaactggtatgtcgatggcgtagaagtacacaatgcaaagactaaaccccgcgaagaacagtacggttcgacatacagagtagtgagcgtcttgcaggtgctgcacgttgactggctcaacggaaaggagtataagtgtaaagtatcgaataaggcacttcccgcacctatcgagaaaacgatctccaaggctaagggtcagccaagagaaccccaagtctacactctgccccctagccgcgacgagcttacgaaaaaccaggtgtcgctcacttgtttggtgaagggtttctatccgagcgatattgtggtagagtgggaatccaacgggcagccagagaacaattacaagacgacgccaccagtgctggattcggatgggagctttttcttgtactcaaagttgaccgtggataaaagccggtggcagcagggtaatgtgttttcatgctcggtaatgcacgaggccctccataaccattatacgcagaaaagcctttcgctctcacccgggaaa

SEQ ID NO: 498 - DNA, 1140 bp, Artificial Sequence
  source: /note="Description of Artificial Sequence: Synthetic polynucleotide"
gcccctacgtcctcctcaactaaaaagacgcaacttcagcttgagcatcttcttctcgaccttcagatgattttgaacggaatcaataattacaaaaatcctaaacttactagaatgctcacgtttaagttttatatgccaaaaaaggccactgagttgaaacaccttcaatgcttggaggaggaacttaaaccacttgaggaagccttgaatcttgctccgtccaaaaactttcatttgcggccacgagttctgataagcaacatcaacgtgatcgtcctggaactgaaaggaagcgaaacgacgtttatgtgcgaatatgcagacgaaactgcgacaatcgttgaatttctcaatcgatggatcacttttagccaatctatcatcagcacgttgactggtggtggaggatcgggaggtggaggatctggaggaggaggatcgggtggaggaggatccgataaaactcatacgtgcccaccctgccccgcaccggagctgcttgggggtccttccgtattcttgtttccgccgaagccgaaggacacgcttatgattagcaggactcccgaagtgacgtgcgtcgtagtcgacgtgtcgcatgaggacccggaggtcaagttcaactggtatgtcgatggcgtagaagtacacaatgcaaagactaaaccccgcgaagaacagtacggttcgacatacagagtagtgagcgtcttgcaggtgctgcacgttgactggctcaacggaaaggagtataagtgtaaagtatcgaataaggcacttcccgcacctatcgagaaaacgatctccaaggctaagggtcagccaagagaaccccaagtctacactctgccccctagccgcgacgagcttacgaaaaaccaggtgtcgctcacttgtttggtgaagggtttctatccgagcgatattgtggtagagtgggaatccaacgggcagccagagaacaattacaagacgacgccaccagtgctggattcggatgggagctttttcttgtactcaaagttgaccgtggataaaagccggtggcagcagggtaatgtgttttcatgctcggtaatgcacgaggccctccataaccattatacgcagaaaagcctttcgctctcacccgggaaa

SEQ ID NO: 499 - DNA, 1140 bp, Artificial Sequence
  source: /note="Description of Artificial Sequence: Synthetic polynucleotide"
gcccctacgtcctcctcaactaaaaagacgcaacttcagcttgagcatcttcttctcgaccttcagatgattttgaacggaatcaataattacaaaaatcctaaacttactagaatgctcacgtttaagttttatatgccaaaaaaggccactgagttgaaacaccttcaatgcttggaggaggaacttaaaccacttgaggaagccttgaatcttgctccgtccaaaaactttcatttgcggccacgagatctgatacgtaacatcaacgtgatcgtcctggaactgaaaggaagcgaaacgacgtttatgtgcgaatatgcagacgaaactgcgacaatcgttgaatttctcaatcgatggatcacttttagccaatctatcatcagcacgttgactggtggtggaggatcgggaggtggaggatctggaggaggaggatcgggtggaggaggatccgataaaactcatacgtgcccaccctgccccgcaccggagctgcttgggggtccttccgtattcttgtttccgccgaagccgaaggacacgcttatgattagcaggactcccgaagtgacgtgcgtcgtagtcgacgtgtcgcatgaggacccggaggtcaagttcaactggtatgtcgatggcgtagaagtacacaatgcaaagactaaaccccgcgaagaacagtacggttcgacatacagagtagtgagcgtcttgcaggtgctgcacgttgactggctcaacggaaaggagtataagtgtaaagtatcgaataaggcacttcccgcacctatcgagaaaacgatctccaaggctaagggtcagccaagagaaccccaagtctacactctgccccctagccgcgacgagcttacgaaaaaccaggtgtcgctcacttgtttggtgaagggtttctatccgagcgatattgtggtagagtgggaatccaacgggcagccagagaacaattacaagacgacgccaccagtgctggattcggatgggagctttttcttgtactcaaagttgaccgtggataaaagccggtggcagcagggtaatgtgttttcatgctcggtaatgcacgaggccctccataaccattatacgcagaaaagcctttcgctctcacccgggaaa

SEQ ID NO: 500 - DNA, 1140 bp, Artificial Sequence
  source: /note="Description of Artificial Sequence: Synthetic polynucleotide"
gcccctacgtcctcctcaactaaaaagacgcaacttcagcttgagcatcttcttctcgaccttcagatgattttgaacggaatcaataattacaaaaatcctaaacttactagaatgctcacgtttaagttttatatgccaaaaaaggccactgagttgaaacaccttcaatgcttggaggaggaacttaaaccacttgaggaagccttgaatcttgctccgtccaaaaactttcatttgcggccacgagatctgataagcctgatcaacgtgatcgtcctggaactgaaaggaagcgaaacgacgtttatgtgcgaatatgcagacgaaactgcgacaatcgttgaatttctcaatcgatggatcacttttagccaatctatcatcagcacgttgactggtggtggaggatcgggaggtggaggatctggaggaggaggatcgggtggaggaggatccgataaaactcatacgtgcccaccctgccccgcaccggagctgcttgggggtccttccgtattcttgtttccgccgaagccgaaggacacgcttatgattagcaggactcccgaagtgacgtgcgtcgtagtcgacgtgtcgcatgaggacccggaggtcaagttcaactggtatgtcgatggcgtagaagtacacaatgcaaagactaaaccccgcgaagaacagtacggttcgacatacagagtagtgagcgtcttgcaggtgctgcacgttgactggctcaacggaaaggagtataagtgtaaagtatcgaataaggcacttcccgcacctatcgagaaaacgatctccaaggctaagggtcagccaagagaaccccaagtctacactctgccccctagccgcgacgagcttacgaaaaaccaggtgtcgctcacttgtttggtgaagggtttctatccgagcgatattgtggtagagtgggaatccaacgggcagccagagaacaattacaagacgacgccaccagtgctggattcggatgggagctttttcttgtactcaaagttgaccgtggataaaagccggtggcagcagggtaatgtgttttcatgctcggtaatgcacgaggccctccataaccattatacgcagaaaagcctttcgctctcacccgggaaa

SEQ ID NO: 501 - DNA, 1140 bp, Artificial Sequence
  source: /note="Description of Artificial Sequence: Synthetic polynucleotide"
gcccctacgtcctcctcaactaaaaagacgcaacttcagcttgagcatcttcttctcgaccttcagatgattttgaacggaatcaataattacaaaaatcctaaacttactagaatgctcacgtttaagttttatatgccaaaaaaggccactgagttgaaacaccttcaatgcttggaggaggaacttaaaccacttgaggaagccttgaatcttgctccgtccaaaaactttcatttgcggccacgagatctgataagcagcatcaacgtgatcgtcctggaactgaaaggaagcgaaacgacgtttatgtgcgaatatgcagacgaaactgcgacaatcgttgaatttctcaatcgatggatcacttttagccaatctatcatcagcacgttgactggtggtggaggatcgggaggtggaggatctggaggaggaggatcgggtggaggaggatccgataaaactcatacgtgcccaccctgccccgcaccggagctgcttgggggtccttccgtattcttgtttccgccgaagccgaaggacacgcttatgattagcaggactcccgaagtgacgtgcgtcgtagtcgacgtgtcgcatgaggacccggaggtcaagttcaactggtatgtcgatggcgtagaagtacacaatgcaaagactaaaccccgcgaagaacagtacggttcgacatacagagtagtgagcgtcttgcaggtgctgcacgttgactggctcaacggaaaggagtataagtgtaaagtatcgaataaggcacttcccgcacctatcgagaaaacgatctccaaggctaagggtcagccaagagaaccccaagtctacactctgccccctagccgcgacgagcttacgaaaaaccaggtgtcgctcacttgtttggtgaagggtttctatccgagcgatattgtggtagagtgggaatccaacgggcagccagagaacaattacaagacgacgccaccagtgctggattcggatgggagctttttcttgtactcaaagttgaccgtggataaaagccggtggcagcagggtaatgtgttttcatgctcggtaatgcacgaggccctccataaccattatacgcagaaaagcctttcgctctcacccgggaaa

SEQ ID NO: 502 - DNA, 1140 bp, Artificial Sequence
  source: /note="Description of Artificial Sequence: Synthetic polynucleotide"
gcccctacgtcctcctcaactaaaaagacgcaacttcagcttgagcatcttcttctcgaccttcagatgattttgaacggaatcaataattacaaaaatcctaaacttactagaatgctcacgtttaagttttatatgccaaaaaaggccactgagttgaaacaccttcaatgcttggaggaggaacttaaaccacttgaggaagccttgaatcttgctccgtccaaaaactttcatttgcggccacgagatctgataagcaacatcaacgtgagcgtcctggaactgaaaggaagcgaaacgacgtttatgtgcgaatatgcagacgaaactgcgacaatcgttgaatttctcaatcgatggatcacttttagccaatctatcatcagcacgttgactggtggtggaggatcgggaggtggaggatctggaggaggaggatcgggtggaggaggatccgataaaactcatacgtgcccaccctgccccgcaccggagctgcttgggggtccttccgtattcttgtttccgccgaagccgaaggacacgcttatgattagcaggactcccgaagtgacgtgcgtcgtagtcgacgtgtcgcatgaggacccggaggtcaagttcaactggtatgtcgatggcgtagaagtacacaatgcaaagactaaaccccgcgaagaacagtacggttcgacatacagagtagtgagcgtcttgcaggtgctgcacgttgactggctcaacggaaaggagtataagtgtaaagtatcgaataaggcacttcccgcacctatcgagaaaacgatctccaaggctaagggtcagccaagagaaccccaagtctacactctgccccctagccgcgacgagcttacgaaaaaccaggtgtcgctcacttgtttggtgaagggtttctatccgagcgatattgtggtagagtgggaatccaacgggcagccagagaacaattacaagacgacgccaccagtgctggattcggatgggagctttttcttgtactcaaagttgaccgtggataaaagccggtggcagcagggtaatgtgttttcatgctcggtaatgcacgaggccctccataaccattatacgcagaaaagcctttcgctctcacccgggaaa

SEQ ID NO: 503 - DNA, 1140 bp, Artificial Sequence
  source: /note="Description of Artificial Sequence: Synthetic polynucleotide"
gcccctacgtcctcctcaactaaaaagacgcaacttcagcttgagcatcttcttctcgaccttcagatgattttgaacggaatcaataattacaaaaatcctgaacttactagaatgctcacgtttaagttttatatgccaaaaaaggccactgagttgaaacaccttcaatgcttggaggaggaacttaaaccacttgaggaagccttgaatcttgctccgtccaaaaactttcatttgcggccacgagatctgataagcaacatcaacgtgatcgtcctggaactgaaaggaagcgaaacgacgtttatgtgcgaatatgcagacgaaactgcgacaatcgttgaatttctcaatcgatggatcacttttagccaatctatcatcagcacgttgactggtggtggaggatcgggaggtggaggatctggaggaggaggatcgggtggaggaggatccgataaaactcatacgtgcccaccctgccccgcaccggagctgcttgggggtccttccgtattcttgtttccgccgaagccgaaggacacgcttatgattagcaggactcccgaagtgacgtgcgtcgtagtcgacgtgtcgcatgaggacccggaggtcaagttcaactggtatgtcgatggcgtagaagtacacaatgcaaagactaaaccccgcgaagaacagtacggttcgacatacagagtagtgagcgtcttgcaggtgctgcacgttgactggctcaacggaaaggagtataagtgtaaagtatcgaataaggcacttcccgcacctatcgagaaaacgatctccaaggctaagggtcagccaagagaaccccaagtctacactctgccccctagccgcgacgagcttacgaaaaaccaggtgtcgctcacttgtttggtgaagggtttctatccgagcgatattgtggtagagtgggaatccaacgggcagccagagaacaattacaagacgacgccaccagtgctggattcggatgggagctttttcttgtactcaaagttgaccgtggataaaagccggtggcagcagggtaatgtgttttcatgctcggtaatgcacgaggccctccataaccattatacgcagaaaagcctttcgctctcacccgggaaa

SEQ ID NO: 504 - DNA, 1140 bp, Artificial Sequence
  source: /note="Description of Artificial Sequence: Synthetic polynucleotide"
gcccctacgtcctcctcaactaaaaagacgcaacttcagcttgagaaccttcttctcgaccttcagatgattttgaacggaatcaataattacaaaaatcctgaacttactagaatgctcacgtttaagttttatatgccaaaaaaggccactgagttgaaacaccttcaatgcttggaggaggaacttaaaccacttgaggaagccttgaatcttgctccgtccaaaaactttcatttgcggccacgagatctgataagcaacatcaacgtgatcgtcctggaactgaaaggaagcgaaacgacgtttatgtgcgaatatgcagacgaaactgcgacaatcgttgaatttctcaatcgatggatcacttttagccaatctatcatcagcacgttgactggtggtggaggatcgggaggtggaggatctggaggaggaggatcgggtggaggaggatccgataaaactcatacgtgcccaccctgccccgcaccggagctgcttgggggtccttccgtattcttgtttccgccgaagccgaaggacacgcttatgattagcaggactcccgaagtgacgtgcgtcgtagtcgacgtgtcgcatgaggacccggaggtcaagttcaactggtatgtcgatggcgtagaagtacacaatgcaaagactaaaccccgcgaagaacagtacggttcgacatacagagtagtgagcgtcttgcaggtgctgcacgttgactggctcaacggaaaggagtataagtgtaaagtatcgaataaggcacttcccgcacctatcgagaaaacgatctccaaggctaagggtcagccaagagaaccccaagtctacactctgccccctagccgcgacgagcttacgaaaaaccaggtgtcgctcacttgtttggtgaagggtttctatccgagcgatattgtggtagagtgggaatccaacgggcagccagagaacaattacaagacgacgccaccagtgctggattcggatgggagctttttcttgtactcaaagttgaccgtggataaaagccggtggcagcagggtaatgtgttttcatgctcggtaatgcacgaggccctccataaccattatacgcagaaaagcctttcgctctcacccgggaaa

SEQ ID NO: 505 - DNA, 1140 bp, Artificial Sequence
  source: /note="Description of Artificial Sequence: Synthetic polynucleotide"
gcccctacgtcctcctcaactaaaaagacgcaacttcagcttgagctgcttcttctcgaccttcagatgattttgaacggaatcaataattacaaaaatcctgaacttactagaatgctcacgtttaagttttatatgccaaaaaaggccactgagttgaaacaccttcaatgcttggaggaggaacttaaaccacttgaggaagccttgaatcttgctccgtccaaaaactttcatttgcggccacgagatctgataagcaacatcaacgtgatcgtcctggaactgaaaggaagcgaaacgacgtttatgtgcgaatatgcagacgaaactgcgacaatcgttgaatttctcaatcgatggatcacttttagccaatctatcatcagcacgttgactggtggtggaggatcgggaggtggaggatctggaggaggaggatcgggtggaggaggatccgataaaactcatacgtgcccaccctgccccgcaccggagctgcttgggggtccttccgtattcttgtttccgccgaagccgaaggacacgcttatgattagcaggactcccgaagtgacgtgcgtcgtagtcgacgtgtcgcatgaggacccggaggtcaagttcaactggtatgtcgatggcgtagaagtacacaatgcaaagactaaaccccgcgaagaacagtacggttcgacatacagagtagtgagcgtcttgcaggtgctgcacgttgactggctcaacggaaaggagtataagtgtaaagtatcgaataaggcacttcccgcacctatcgagaaaacgatctccaaggctaagggtcagccaagagaaccccaagtctacactctgccccctagccgcgacgagcttacgaaaaaccaggtgtcgctcacttgtttggtgaagggtttctatccgagcgatattgtggtagagtgggaatccaacgggcagccagagaacaattacaagacgacgccaccagtgctggattcggatgggagctttttcttgtactcaaagttgaccgtggataaaagccggtggcagcagggtaatgtgttttcatgctcggtaatgcacgaggccctccataaccattatacgcagaaaagcctttcgctctcacccgggaaa

SEQ ID NO: 506 - DNA, 1140 bp, Artificial Sequence
  source: /note="Description of Artificial Sequence: Synthetic polynucleotide"
gcccctacgtcctcctcaactaaaaagacgcaacttcagcttgagcatcttcttctcgaccttcagatgattttgaacggaatcaataattacaaaaatcctgaacttactagaatgctcacgtttaagttttatatgccaaaaaaggccactgagttgaaacaccttcaatgcttggaggaggaacttaaaccacttgaggaagccttgaatcttgctccgtccaaaaactttcatttgcggccacgagtgctgataagcaacatcaacgtgatcgtcctggaactgaaaggaagcgaaacgacgtttatgtgcgaatatgcagacgaaactgcgacaatcgttgaatttctcaatcgatggatcacttttagccaatctatcatcagcacgttgactggtggtggaggatcgggaggtggaggatctggaggaggaggatcgggtggaggaggatccgataaaactcatacgtgcccaccctgccccgcaccggagctgcttgggggtccttccgtattcttgtttccgccgaagccgaaggacacgcttatgattagcaggactcccgaagtgacgtgcgtcgtagtcgacgtgtcgcatgaggacccggaggtcaagttcaactggtatgtcgatggcgtagaagtacacaatgcaaagactaaaccccgcgaagaacagtacggttcgacatacagagtagtgagcgtcttgcaggtgctgcacgttgactggctcaacggaaaggagtataagtgtaaagtatcgaataaggcacttcccgcacctatcgagaaaacgatctccaaggctaagggtcagccaagagaaccccaagtctacactctgccccctagccgcgacgagcttacgaaaaaccaggtgtcgctcacttgtttggtgaagggtttctatccgagcgatattgtggtagagtgggaatccaacgggcagccagagaacaattacaagacgacgccaccagtgctggattcggatgggagctttttcttgtactcaaagttgaccgtggataaaagccggtggcagcagggtaatgtgttttcatgctcggtaatgcacgaggccctccataaccattatacgcagaaaagcctttcgctctcacccgggaaa

SEQ ID NO: 507 - DNA, 1140 bp, Artificial Sequence
  source: /note="Description of Artificial Sequence: Synthetic polynucleotide"
gcccctacgtcctcctcaactaaaaagacgcaacttcagcttgagcatcttcttctcgaccttcagatgattttgaacggaatcaataattacaaaaatcctgaacttactagaatgctcacgtttaagttttatatgccaaaaaaggccactgagttgaaacaccttcaatgcttggaggaggaacttaaaccacttgaggaagccttgaatcttgctccgtccaaaaactttcatttgcggccacgagatctgataagcaacatcaacgtgagcgtcctggaactgaaaggaagcgaaacgacgtttatgtgcgaatatgcagacgaaactgcgacaatcgttgaatttctcaatcgatggatcacttttagccaatctatcatcagcacgttgactggtggtggaggatcgggaggtggaggatctggaggaggaggatcgggtggaggaggatccgataaaactcatacgtgcccaccctgccccgcaccggagctgcttgggggtccttccgtattcttgtttccgccgaagccgaaggacacgcttatgattagcaggactcccgaagtgacgtgcgtcgtagtcgacgtgtcgcatgaggacccggaggtcaagttcaactggtatgtcgatggcgtagaagtacacaatgcaaagactaaaccccgcgaagaacagtacggttcgacatacagagtagtgagcgtcttgcaggtgctgcacgttgactggctcaacggaaaggagtataagtgtaaagtatcgaataaggcacttcccgcacctatcgagaaaacgatctccaaggctaagggtcagccaagagaaccccaagtctacactctgccccctagccgcgacgagcttacgaaaaaccaggtgtcgctcacttgtttggtgaagggtttctatccgagcgatattgtggtagagtgggaatccaacgggcagccagagaacaattacaagacgacgccaccagtgctggattcggatgggagctttttcttgtactcaaagttgaccgtggataaaagccggtggcagcagggtaatgtgttttcatgctcggtaatgcacgaggccctccataaccattatacgcagaaaagcctttcgctctcacccgggaaa

SEQ ID NO: 508 - DNA, 1140 bp, Artificial Sequence
  source: /note="Description of Artificial Sequence: Synthetic polynucleotide"
gcccctacgtcctcctcaactaaaaagacgcaacttcagcttgagcatcttcttctcgaccttcagatgattttgaacggaatcaataattacaaaaatcctaaacttactcagatgctcacgtttaagttttatatgccaaaaaaggccactgagttgaaacaccttcaatgcttggaggaggaacttaaaccacttgaggaagccttgaatcttgctccgtccaaaaactttcatttgcggccacgagatctgataagcaacatcaacgtgatcgtcctggaactgaaaggaagcgaaacgacgtttatgtgcgaatatgcagacgaaactgcgacaatcgttgaatttctcaatcgatggatcacttttagccaatctatcatcagcacgttgactggtggtggaggatcgggaggtggaggatctggaggaggaggatcgggtggaggaggatccgataaaactcatacgtgcccaccctgccccgcaccggagctgcttgggggtccttccgtattcttgtttccgccgaagccgaaggacacgcttatgattagcaggactcccgaagtgacgtgcgtcgtagtcgacgtgtcgcatgaggacccggaggtcaagttcaactggtatgtcgatggcgtagaagtacacaatgcaaagactaaaccccgcgaagaacagtacggttcgacatacagagtagtgagcgtcttgcaggtgctgcacgttgactggctcaacggaaaggagtataagtgtaaagtatcgaataaggcacttcccgcacctatcgagaaaacgatctccaaggctaagggtcagccaagagaaccccaagtctacactctgccccctagccgcgacgagcttacgaaaaaccaggtgtcgctcacttgtttggtgaagggtttctatccgagcgatattgtggtagagtgggaatccaacgggcagccagagaacaattacaagacgacgccaccagtgctggattcggatgggagctttttcttgtactcaaagttgaccgtggataaaagccggtggcagcagggtaatgtgttttcatgctcggtaatgcacgaggccctccataaccattatacgcagaaaagcctttcgctctcacccgggaaa

SEQ ID NO: 509 - DNA, 1140 bp, Artificial Sequence
  source: /note="Description of Artificial Sequence: Synthetic polynucleotide"
gcccctacgtcctcctcaactaaaaagacgcaacttcagcttgagaaccttcttctcgaccttcagatgattttgaacggaatcaataattacaaaaatcctaaacttactcagatgctcacgtttaagttttatatgccaaaaaaggccactgagttgaaacaccttcaatgcttggaggaggaacttaaaccacttgaggaagccttgaatcttgctccgtccaaaaactttcatttgcggccacgagatctgataagcaacatcaacgtgatcgtcctggaactgaaaggaagcgaaacgacgtttatgtgcgaatatgcagacgaaactgcgacaatcgttgaatttctcaatcgatggatcacttttagccaatctatcatcagcacgttgactggtggtggaggatcgggaggtggaggatctggaggaggaggatcgggtggaggaggatccgataaaactcatacgtgcccaccctgccccgcaccggagctgcttgggggtccttccgtattcttgtttccgccgaagccgaaggacacgcttatgattagcaggactcccgaagtgacgtgcgtcgtagtcgacgtgtcgcatgaggacccggaggtcaagttcaactggtatgtcgatggcgtagaagtacacaatgcaaagactaaaccccgcgaagaacagtacggttcgacatacagagtagtgagcgtcttgcaggtgctgcacgttgactggctcaacggaaaggagtataagtgtaaagtatcgaataaggcacttcccgcacctatcgagaaaacgatctccaaggctaagggtcagccaagagaaccccaagtctacactctgccccctagccgcgacgagcttacgaaaaaccaggtgtcgctcacttgtttggtgaagggtttctatccgagcgatattgtggtagagtgggaatccaacgggcagccagagaacaattacaagacgacgccaccagtgctggattcggatgggagctttttcttgtactcaaagttgaccgtggataaaagccggtggcagcagggtaatgtgttttcatgctcggtaatgcacgaggccctccataaccattatacgcagaaaagcctttcgctctcacccgggaaa

SEQ ID NO: 510 - DNA, 1140 bp, Artificial Sequence
  source: /note="Description of Artificial Sequence: Synthetic polynucleotide"
gcccctacgtcctcctcaactaaaaagacgcaacttcagcttgagctgcttcttctcgaccttcagatgattttgaacggaatcaataattacaaaaatcctaaacttactcagatgctcacgtttaagttttatatgccaaaaaaggccactgagttgaaacaccttcaatgcttggaggaggaacttaaaccacttgaggaagccttgaatcttgctccgtccaaaaactttcatttgcggccacgagatctgataagcaacatcaacgtgatcgtcctggaactgaaaggaagcgaaacgacgtttatgtgcgaatatgcagacgaaactgcgacaatcgttgaatttctcaatcgatggatcacttttagccaatctatcatcagcacgttgactggtggtggaggatcgggaggtggaggatctggaggaggaggatcgggtggaggaggatccgataaaactcatacgtgcccaccctgccccgcaccggagctgcttgggggtccttccgtattcttgtttccgccgaagccgaaggacacgcttatgattagcaggactcccgaagtgacgtgcgtcgtagtcgacgtgtcgcatgaggacccggaggtcaagttcaactggtatgtcgatggcgtagaagtacacaatgcaaagactaaaccccgcgaagaacagtacggttcgacatacagagtagtgagcgtcttgcaggtgctgcacgttgactggctcaacggaaaggagtataagtgtaaagtatcgaataaggcacttcccgcacctatcgagaaaacgatctccaaggctaagggtcagccaagagaaccccaagtctacactctgccccctagccgcgacgagcttacgaaaaaccaggtgtcgctcacttgtttggtgaagggtttctatccgagcgatattgtggtagagtgggaatccaacgggcagccagagaacaattacaagacgacgccaccagtgctggattcggatgggagctttttcttgtactcaaagttgaccgtggataaaagccggtggcagcagggtaatgtgttttcatgctcggtaatgcacgaggccctccataaccattatacgcagaaaagcctttcgctctcacccgggaaa

SEQ ID NO: 511 - DNA, 1140 bp, Artificial Sequence
  source: /note="Description of Artificial Sequence: Synthetic polynucleotide"
gcccctacgtcctcctcaactaaaaagacgcaacttcagcttgagcatcttcttctcgaccttcagatgattttgaacggaatcaataattacaaaaatcctaaacttactcagatgctcacgtttaagttttatatgccaaaaaaggccactgagttgaaacaccttcaatgcttggaggaggaacttaaaccacttgaggaagccttgaatcttgctccgtccaaaaactttcatttgcggccacgagtgctgataagcaacatcaacgtgatcgtcctggaactgaaaggaagcgaaacgacgtttatgtgcgaatatgcagacgaaactgcgacaatcgttgaatttctcaatcgatggatcacttttagccaatctatcatcagcacgttgactggtggtggaggatcgggaggtggaggatctggaggaggaggatcgggtggaggaggatccgataaaactcatacgtgcccaccctgccccgcaccggagctgcttgggggtccttccgtattcttgtttccgccgaagccgaaggacacgcttatgattagcaggactcccgaagtgacgtgcgtcgtagtcgacgtgtcgcatgaggacccggaggtcaagttcaactggtatgtcgatggcgtagaagtacacaatgcaaagactaaaccccgcgaagaacagtacggttcgacatacagagtagtgagcgtcttgcaggtgctgcacgttgactggctcaacggaaaggagtataagtgtaaagtatcgaataaggcacttcccgcacctatcgagaaaacgatctccaaggctaagggtcagccaagagaaccccaagtctacactctgccccctagccgcgacgagcttacgaaaaaccaggtgtcgctcacttgtttggtgaagggtttctatccgagcgatattgtggtagagtgggaatccaacgggcagccagagaacaattacaagacgacgccaccagtgctggattcggatgggagctttttcttgtactcaaagttgaccgtggataaaagccggtggcagcagggtaatgtgttttcatgctcggtaatgcacgaggccctccataaccattatacgcagaaaagcctttcgctctcacccgggaaa

SEQ ID NO: 512 - DNA, 1140 bp, Artificial Sequence
  source: /note="Description of Artificial Sequence: Synthetic polynucleotide"
gcccctacgtcctcctcaactaaaaagacgcaacttcagcttgagcatcttcttctcgaccttcagatgattttgaacggaatcaataattacaaaaatcctaaacttactcagatgctcacgtttaagttttatatgccaaaaaaggccactgagttgaaacaccttcaatgcttggaggaggaacttaaaccacttgaggaagccttgaatcttgctccgtccaaaaactttcatttgcggccacgagatctgataagcaacatcaacgtgagcgtcctggaactgaaaggaagcgaaacgacgtttatgtgcgaatatgcagacgaaactgcgacaatcgttgaatttctcaatcgatggatcacttttagccaatctatcatcagcacgttgactggtggtggaggatcgggaggtggaggatctggaggaggaggatcgggtggaggaggatccgataaaactcatacgtgcccaccctgccccgcaccggagctgcttgggggtccttccgtattcttgtttccgccgaagccgaaggacacgcttatgattagcaggactcccgaagtgacgtgcgtcgtagtcgacgtgtcgcatgaggacccggaggtcaagttcaactggtatgtcgatggcgtagaagtacacaatgcaaagactaaaccccgcgaagaacagtacggttcgacatacagagtagtgagcgtcttgcaggtgctgcacgttgactggctcaacggaaaggagtataagtgtaaagtatcgaataaggcacttcccgcacctatcgagaaaacgatctccaaggctaagggtcagccaagagaaccccaagtctacactctgccccctagccgcgacgagcttacgaaaaaccaggtgtcgctcacttgtttggtgaagggtttctatccgagcgatattgtggtagagtgggaatccaacgggcagccagagaacaattacaagacgacgccaccagtgctggattcggatgggagctttttcttgtactcaaagttgaccgtggataaaagccggtggcagcagggtaatgtgttttcatgctcggtaatgcacgaggccctccataaccattatacgcagaaaagcctttcgctctcacccgggaaa

SEQ ID NO: 513 - DNA, 1140 bp, Artificial Sequence
  source: /note="Description of Artificial Sequence: Synthetic polynucleotide"
gcccctacgtcctcctcaactaaaaagacgcaacttcagcttgagcatcttcttctcgaccttcagatgattttgaacggaatcaataattacaaaaatcctaaacttactaacatgctcacgtttaagttttatatgccaaaaaaggccactgagttgaaacaccttcaatgcttggaggaggaacttaaaccacttgaggaagccttgaatcttgctccgtccaaaaactttcatttgcggccacgagatctgataagcaacatcaacgtgatcgtcctggaactgaaaggaagcgaaacgacgtttatgtgcgaatatgcagacgaaactgcgacaatcgttgaatttctcaatcgatggatcacttttagccaatctatcatcagcacgttgactggtggtggaggatcgggaggtggaggatctggaggaggaggatcgggtggaggaggatccgataaaactcatacgtgcccaccctgccccgcaccggagctgcttgggggtccttccgtattcttgtttccgccgaagccgaaggacacgcttatgattagcaggactcccgaagtgacgtgcgtcgtagtcgacgtgtcgcatgaggacccggaggtcaagttcaactggtatgtcgatggcgtagaagtacacaatgcaaagactaaaccccgcgaagaacagtacggttcgacatacagagtagtgagcgtcttgcaggtgctgcacgttgactggctcaacggaaaggagtataagtgtaaagtatcgaataaggcacttcccgcacctatcgagaaaacgatctccaaggctaagggtcagccaagagaaccccaagtctacactctgccccctagccgcgacgagcttacgaaaaaccaggtgtcgctcacttgtttggtgaagggtttctatccgagcgatattgtggtagagtgggaatccaacgggcagccagagaacaattacaagacgacgccaccagtgctggattcggatgggagctttttcttgtactcaaagttgaccgtggataaaagccggtggcagcagggtaatgtgttttcatgctcggtaatgcacgaggccctccataaccattatacgcagaaaagcctttcgctctcacccgggaaa

SEQ ID NO: 514 - DNA, 1140 bp, Artificial Sequence
  source: /note="Description of Artificial Sequence: Synthetic polynucleotide"
gcccctacgtcctcctcaactaaaaagacgcaacttcagcttgagaaccttcttctcgaccttcagatgattttgaacggaatcaataattacaaaaatcctaaacttactaacatgctcacgtttaagttttatatgccaaaaaaggccactgagttgaaacaccttcaatgcttggaggaggaacttaaaccacttgaggaagccttgaatcttgctccgtccaaaaactttcatttgcggccacgagatctgataagcaacatcaacgtgatcgtcctggaactgaaaggaagcgaaacgacgtttatgtgcgaatatgcagacgaaactgcgacaatcgttgaatttctcaatcgatggatcacttttagccaatctatcatcagcacgttgactggtggtggaggatcgggaggtggaggatctggaggaggaggatcgggtggaggaggatccgataaaactcatacgtgcccaccctgccccgcaccggagctgcttgggggtccttccgtattcttgtttccgccgaagccgaaggacacgcttatgattagcaggactcccgaagtgacgtgcgtcgtagtcgacgtgtcgcatgaggacccggaggtcaagttcaactggtatgtcgatggcgtagaagtacacaatgcaaagactaaaccccgcgaagaacagtacggttcgacatacagagtagtgagcgtcttgcaggtgctgcacgttgactggctcaacggaaaggagtataagtgtaaagtatcgaataaggcacttcccgcacctatcgagaaaacgatctccaaggctaagggtcagccaagagaaccccaagtctacactctgccccctagccgcgacgagcttacgaaaaaccaggtgtcgctcacttgtttggtgaagggtttctatccgagcgatattgtggtagagtgggaatccaacgggcagccagagaacaattacaagacgacgccaccagtgctggattcggatgggagctttttcttgtactcaaagttgaccgtggataaaagccggtggcagcagggtaatgtgttttcatgctcggtaatgcacgaggccctccataaccattatacgcagaaaagcctttcgctctcacccgggaaa

SEQ ID NO: 515 - DNA, 1140 bp, Artificial Sequence
  source: /note="Description of Artificial Sequence: Synthetic polynucleotide"
gcccctacgtcctcctcaactaaaaagacgcaacttcagcttgagttgcttcttctcgaccttcagatgattttgaacggaatcaataattacaaaaatcctaaacttactaacatgctcacgtttaagttttatatgccaaaaaaggccactgagttgaaacaccttcaatgcttggaggaggaacttaaaccacttgaggaagccttgaatcttgctccgtccaaaaactttcatttgcggccacgagatctgataagcaacatcaacgtgatcgtcctggaactgaaaggaagcgaaacgacgtttatgtgcgaatatgcagacgaaactgcgacaatcgttgaatttctcaatcgatggatcacttttagccaatctatcatcagcacgttgactggtggtggaggatcgggaggtggaggatctggaggaggaggatcgggtggaggaggatccgataaaactcatacgtgcccaccctgccccgcaccggagctgcttgggggtccttccgtattcttgtttccgccgaagccgaaggacacgcttatgattagcaggactcccgaagtgacgtgcgtcgtagtcgacgtgtcgcatgaggacccggaggtcaagttcaactggtatgtcgatggcgtagaagtacacaatgcaaagactaaaccccgcgaagaacagtacggttcgacatacagagtagtgagcgtcttgcaggtgctgcacgttgactggctcaacggaaaggagtataagtgtaaagtatcgaataaggcacttcccgcacctatcgagaaaacgatctccaaggctaagggtcagccaagagaaccccaagtctacactctgccccctagccgcgacgagcttacgaaaaaccaggtgtcgctcacttgtttggtgaagggtttctatccgagcgatattgtggtagagtgggaatccaacgggcagccagagaacaattacaagacgacgccaccagtgctggattcggatgggagctttttcttgtactcaaagttgaccgtggataaaagccggtggcagcagggtaatgtgttttcatgctcggtaatgcacgaggccctccataaccattatacgcagaaaagcctttcgctctcacccgggaaa

SEQ ID NO: 516 - DNA, 1140 bp, Artificial Sequence
  source: /note="Description of Artificial Sequence: Synthetic polynucleotide"
gcccctacgtcctcctcaactaaaaagacgcaacttcagcttgagcatcttcttctcgaccttcagatgattttgaacggaatcaataattacaaaaatcctaaacttactaacatgctcacgtttaagttttatatgccaaaaaaggccactgagttgaaacaccttcaatgcttggaggaggaacttaaaccacttgaggaagccttgaatcttgctccgtccaaaaactttcatttgcggccacgagtcctgataagcaacatcaacgtgatcgtcctggaactgaaaggaagcgaaacgacgtttatgtgcgaatatgcagacgaaactgcgacaatcgttgaatttctcaatcgatggatcacttttagccaatctatcatcagcacgttgactggtggtggaggatcgggaggtggaggatctggaggaggaggatcgggtggaggaggatccgataaaactcatacgtgcccaccctgccccgcaccggagctgcttgggggtccttccgtattcttgtttccgccgaagccgaaggacacgcttatgattagcaggactcccgaagtgacgtgcgtcgtagtcgacgtgtcgcatgaggacccggaggtcaagttcaactggtatgtcgatggcgtagaagtacacaatgcaaagactaaaccccgcgaagaacagtacggttcgacatacagagtagtgagcgtcttgcaggtgctgcacgttgactggctcaacggaaaggagtataagtgtaaagtatcgaataaggcacttcccgcacctatcgagaaaacgatctccaaggctaagggtcagccaagagaaccccaagtctacactctgccccctagccgcgacgagcttacgaaaaaccaggtgtcgctcacttgtttggtgaagggtttctatccgagcgatattgtggtagagtgggaatccaacgggcagccagagaacaattacaagacgacgccaccagtgctggattcggatgggagctttttcttgtactcaaagttgaccgtggataaaagccggtggcagcagggtaatgtgttttcatgctcggtaatgcacgaggccctccataaccattatacgcagaaaagcctttcgctctcacccgggaaa

SEQ ID NO: 517 - DNA, 1140 bp, Artificial Sequence
  source: /note="Description of Artificial Sequence: Synthetic polynucleotide"
gcccctacgtcctcctcaactaaaaagacgcaacttcagcttgagcatcttcttctcgaccttcagatgattttgaacggaatcaataattacaaaaatcctaaacttactaacatgctcacgtttaagttttatatgccaaaaaaggccactgagttgaaacaccttcaatgcttggaggaggaacttaaaccacttgaggaagccttgaatcttgctccgtccaaaaactttcatttgcggccacgagatctgataagcaacatcaacgtgagcgtcctggaactgaaaggaagcgaaacgacgtttatgtgcgaatatgcagacgaaactgcgacaatcgttgaatttctcaatcgatggatcacttttagccaatctatcatcagcacgttgactggtggtggaggatcgggaggtggaggatctggaggaggaggatcgggtggaggaggatccgataaaactcatacgtgcccaccctgccccgcaccggagctgcttgggggtccttccgtattcttgtttccgccgaagccgaaggacacgcttatgattagcaggactcccgaagtgacgtgcgtcgtagtcgacgtgtcgcatgaggacccggaggtcaagttcaactggtatgtcgatggcgtagaagtacacaatgcaaagactaaaccccgcgaagaacagtacggttcgacatacagagtagtgagcgtcttgcaggtgctgcacgttgactggctcaacggaaaggagtataagtgtaaagtatcgaataaggcacttcccgcacctatcgagaaaacgatctccaaggctaagggtcagccaagagaaccccaagtctacactctgccccctagccgcgacgagcttacgaaaaaccaggtgtcgctcacttgtttggtgaagggtttctatccgagcgatattgtggtagagtgggaatccaacgggcagccagagaacaattacaagacgacgccaccagtgctggattcggatgggagctttttcttgtactcaaagttgaccgtggataaaagccggtggcagcagggtaatgtgttttcatgctcggtaatgcacgaggccctccataaccattatacgcagaaaagcctttcgctctcacccgggaaa

SEQ ID NO: 518 - DNA, 1140 bp, Artificial Sequence
  source: /note="Description of Artificial Sequence: Synthetic polynucleotide"
gcccctacgtcctcctcaactaaaaagacgcaacttcagcttgagcatcttcttctcgaccttcagatgattttgaacggaatcaataattacaaaaatcctaaacttactgaaatgctcacgtttaagttttatatgccaaaaaaggccactgagttgaaacaccttcaatgcttggaggaggaacttaaaccacttgaggaagccttgaatcttgctccgtccaaaaactttcatttgcggccacgagatctgataagcaacatcaacgtgatcgtcctggaactgaaaggaagcgaaacgacgtttatgtgcgaatatgcagacgaaactgcgacaatcgttgaatttctcaatcgatggatcacttttagccaatctatcatcagcacgttgactggtggtggaggatcgggaggtggaggatctggaggaggaggatcgggtggaggaggatccgataaaactcatacgtgcccaccctgccccgcaccggagctgcttgggggtccttccgtattcttgtttccgccgaagccgaaggacacgcttatgattagcaggactcccgaagtgacgtgcgtcgtagtcgacgtgtcgcatgaggacccggaggtcaagttcaactggtatgtcgatggcgtagaagtacacaatgcaaagactaaaccccgcgaagaacagtacggttcgacatacagagtagtgagcgtcttgcaggtgctgcacgttgactggctcaacggaaaggagtataagtgtaaagtatcgaataaggcacttcccgcacctatcgagaaaacgatctccaaggctaagggtcagccaagagaaccccaagtctacactctgccccctagccgcgacgagcttacgaaaaaccaggtgtcgctcacttgtttggtgaagggtttctatccgagcgatattgtggtagagtgggaatccaacgggcagccagagaacaattacaagacgacgccaccagtgctggattcggatgggagctttttcttgtactcaaagttgaccgtggataaaagccggtggcagcagggtaatgtgttttcatgctcggtaatgcacgaggccctccataaccattatacgcagaaaagcctttcgctctcacccgggaaa

SEQ ID NO: 519 - DNA, 1140 bp, Artificial Sequence
  source: /note="Description of Artificial Sequence: Synthetic polynucleotide"
gcccctacgtcctcctcaactaaaaagacgcaacttcagcttgagcatcttcttctcgaccttcagatgattttgaacggaatcaataattacaaaaatcctaaacttactagaatgctcacgaagaagttttatatgccaaaaaaggccactgagttgaaacaccttcaatgcttggaggaggaacttaaaccacttgaggaagccttgaatcttgctccgtccaaaaactttcatttgcggccacgagatctgataagcaacatcaacgtgatcgtcctggaactgaaaggaagcgaaacgacgtttatgtgcgaatatgcagacgaaactgcgacaatcgttgaatttctcaatcgatggatcacttttagccaatctatcatcagcacgttgactggtggtggaggatcgggaggtggaggatctggaggaggaggatcgggtggaggaggatccgataaaactcatacgtgcccaccctgccccgcaccggagctgcttgggggtccttccgtattcttgtttccgccgaagccgaaggacacgcttatgattagcaggactcccgaagtgacgtgcgtcgtagtcgacgtgtcgcatgaggacccggaggtcaagttcaactggtatgtcgatggcgtagaagtacacaatgcaaagactaaaccccgcgaagaacagtacggttcgacatacagagtagtgagcgtcttgcaggtgctgcacgttgactggctcaacggaaaggagtataagtgtaaagtatcgaataaggcacttcccgcacctatcgagaaaacgatctccaaggctaagggtcagccaagagaaccccaagtctacactctgccccctagccgcgacgagcttacgaaaaaccaggtgtcgctcacttgtttggtgaagggtttctatccgagcgatattgtggtagagtgggaatccaacgggcagccagagaacaattacaagacgacgccaccagtgctggattcggatgggagctttttcttgtactcaaagttgaccgtggataaaagccggtggcagcagggtaatgtgttttcatgctcggtaatgcacgaggccctccataaccattatacgcagaaaagcctttcgctctcacccgggaaa

SEQ ID NO: 520 - DNA, 1140 bp, Artificial Sequence
  source: /note="Description of Artificial Sequence: Synthetic polynucleotide"
gcccctacgtcctcctcaactaaaaagacgcaacttcagcttgagcatcttcttctcgaccttcagatgattttgaacggaatcaataattacaaaaatcctaaacttactagaatgctcacgcagaagttttatatgccaaaaaaggccactgagttgaaacaccttcaatgcttggaggaggaacttaaaccacttgaggaagccttgaatcttgctccgtccaaaaactttcatttgcggccacgagatctgataagcaacatcaacgtgatcgtcctggaactgaaaggaagcgaaacgacgtttatgtgcgaatatgcagacgaaactgcgacaatcgttgaatttctcaatcgatggatcacttttagccaatctatcatcagcacgttgactggtggtggaggatcgggaggtggaggatctggaggaggaggatcgggtggaggaggatccgataaaactcatacgtgcccaccctgccccgcaccggagctgcttgggggtccttccgtattcttgtttccgccgaagccgaaggacacgcttatgattagcaggactcccgaagtgacgtgcgtcgtagtcgacgtgtcgcatgaggacccggaggtcaagttcaactggtatgtcgatggcgtagaagtacacaatgcaaagactaaaccccgcgaagaacagtacggttcgacatacagagtagtgagcgtcttgcaggtgctgcacgttgactggctcaacggaaaggagtataagtgtaaagtatcgaataaggcacttcccgcacctatcgagaaaacgatctccaaggctaagggtcagccaagagaaccccaagtctacactctgccccctagccgcgacgagcttacgaaaaaccaggtgtcgctcacttgtttggtgaagggtttctatccgagcgatattgtggtagagtgggaatccaacgggcagccagagaacaattacaagacgacgccaccagtgctggattcggatgggagctttttcttgtactcaaagttgaccgtggataaaagccggtggcagcagggtaatgtgttttcatgctcggtaatgcacgaggccctccataaccattatacgcagaaaagcctttcgctctcacccgggaaa

SEQ ID NO: 521 - DNA, 1140 bp, Artificial Sequence
  source: /note="Description of Artificial Sequence: Synthetic polynucleotide"
gcccctacgtcctcctcaactaaaaagacgcaacttcagcttgagcatcttcttctcgaccttcagatgattttgaacggaatcaataattacaaaaatcctaaacttactagaatgctcacggcaaagtttgctatgccaaaaaaggccactgagttgaaacaccttcaatgcttggaggaggaacttaaaccacttgaggaagccttgaatggtgctccgtccaaaaactttcatttgcggccacgagatctgataagcgatatcaacgtgatcgtcctggaactgaaaggaagcgaaacgacgtttatgtgcgaatatgcagacgaaactgcgacaatcgttgaatttctcaatcgatggatcacttttagccaatctatcatcagcacgttgactggtggtggaggatcgggaggtggaggatctggaggaggaggatcgggtggaggaggatccgataaaactcatacgtgcccaccctgccccgcaccggagctgcttgggggtccttccgtattcttgtttccgccgaagccgaaggacacgcttatgattagcaggactcccgaagtgacgtgcgtcgtagtcgacgtgtcgcatgaggacccggaggtcaagttcaactggtatgtcgatggcgtagaagtacacaatgcaaagactaaaccccgcgaagaacagtacggttcgacatacagagtagtgagcgtcttgcaggtgctgcacgttgactggctcaacggaaaggagtataagtgtaaagtatcgaataaggcacttcccgcacctatcgagaaaacgatctccaaggctaagggtcagccaagagaaccccaagtctacactctgccccctagccgcgacgagcttacgaaaaaccaggtgtcgctcacttgtttggtgaagggtttctatccgagcgatattgtggtagagtgggaatccaacgggcagccagagaacaattacaagacgacgccaccagtgctggattcggatgggagctttttcttgtactcaaagttgaccgtggataaaagccggtggcagcagggtaatgtgttttcatgctcggtaatgcacgaggccctccataaccattatacgcagaaaagcctttcgctctcacccgggaaa

SEQ ID NO: 522 - DNA, 1140 bp, Artificial Sequence
  source: /note="Description of Artificial Sequence: Synthetic polynucleotide"
gcccctacgtcctcctcaactaaaaagacgcaacttcagcttgagcatcttcttctcgaccttcagatgattttgaacggaatcaataattacaaaaatcctaaacttactaacatgctcacgtttaagttttatatgccaaaaaaggccactgagttgaaacaccttcaatgcttggaggaggaacttaaaccacttgaggaagccttgaatcttgctccgtccaaaaactttcatttgcggccacgagatctgataaggaacatcaacgtgatcgtcctggaactgaaaggaagcgaaacgacgtttatgtgcgaatatgcagacgaaactgcgacaatcgttgaatttctcaatcgatggatcacttttagccaatctatcatcagcacgttgactggtggtggaggatcgggaggtggaggatctggaggaggaggatcgggtggaggaggatccgataaaactcatacgtgcccaccctgccccgcaccggagctgcttgggggtccttccgtattcttgtttccgccgaagccgaaggacacgcttatgattagcaggactcccgaagtgacgtgcgtcgtagtcgacgtgtcgcatgaggacccggaggtcaagttcaactggtatgtcgatggcgtagaagtacacaatgcaaagactaaaccccgcgaagaacagtacggttcgacatacagagtagtgagcgtcttgcaggtgctgcacgttgactggctcaacggaaaggagtataagtgtaaagtatcgaataaggcacttcccgcacctatcgagaaaacgatctccaaggctaagggtcagccaagagaaccccaagtctacactctgccccctagccgcgacgagcttacgaaaaaccaggtgtcgctcacttgtttggtgaagggtttctatccgagcgatattgtggtagagtgggaatccaacgggcagccagagaacaattacaagacgacgccaccagtgctggattcggatgggagctttttcttgtactcaaagttgaccgtggataaaagccggtggcagcagggtaatgtgttttcatgctcggtaatgcacgaggccctccataaccattatacgcagaaaagcctttcgctctcacccgggaaa

SEQ ID NO: 523 - DNA, 1140 bp, Artificial Sequence
  source: /note="Description of Artificial Sequence: Synthetic polynucleotide"
gcccctacgtcctcctcaactaaaaagacgcaacttcagcttgagaaccttcttctcgaccttcagatgattttgaacggaatcaataattacaaaaatcctaaacttactgaaatgctcacgtttaagttttatatgccaaaaaaggccactgagttgaaacaccttcaatgcttggaggaggaacttaaaccacttgaggaagccttgaatcttgctccgtccaaaaactttcatttgcggccacgagatctgataagcaacatcaacgtgatcgtcctggaactgaaaggaagcgaaacgacgtttatgtgcgaatatgcagacgaaactgcgacaatcgttgaatttctcaatcgatggatcacttttagccaatctatcatcagcacgttgactggtggtggaggatcgggaggtggaggatctggaggaggaggatcgggtggaggaggatccgataaaactcatacgtgcccaccctgccccgcaccggagctgcttgggggtccttccgtattcttgtttccgccgaagccgaaggacacgcttatgattagcaggactcccgaagtgacgtgcgtcgtagtcgacgtgtcgcatgaggacccggaggtcaagttcaactggtatgtcgatggcgtagaagtacacaatgcaaagactaaaccccgcgaagaacagtacggttcgacatacagagtagtgagcgtcttgcaggtgctgcacgttgactggctcaacggaaaggagtataagtgtaaagtatcgaataaggcacttcccgcacctatcgagaaaacgatctccaaggctaagggtcagccaagagaaccccaagtctacactctgccccctagccgcgacgagcttacgaaaaaccaggtgtcgctcacttgtttggtgaagggtttctatccgagcgatattgtggtagagtgggaatccaacgggcagccagagaacaattacaagacgacgccaccagtgctggattcggatgggagctttttcttgtactcaaagttgaccgtggataaaagccggtggcagcagggtaatgtgttttcatgctcggtaatgcacgaggccctccataaccattatacgcagaaaagcctttcgctctcacccgggaaa

SEQ ID NO: 524 - DNA, 1140 bp, Artificial Sequence
  source: /note="Description of Artificial Sequence: Synthetic polynucleotide"
gcccctacgtcctcctcaactaaaaagacgcaacttcagcttgagcatcttcttctcgaccttcagatgattttgaacggaatcaataattacaaaaatcctaaacttactgaaatgctcacgtttaagttttatatgccaaaaaaggccactgagttgaaacaccttcaatgcttggaggaggaacttaaaccacttgaggaagccttgaatcttgctccgtccaaaaactttcatttgcggccacgagtcctgataagcaacatcaacgtgatcgtcctggaactgaaaggaagcgaaacgacgtttatgtgcgaatatgcagacgaaactgcgacaatcgttgaatttctcaatcgatggatcacttttagccaatctatcatcagcacgttgactggtggtggaggatcgggaggtggaggatctggaggaggaggatcgggtggaggaggatccgataaaactcatacgtgcccaccctgccccgcaccggagctgcttgggggtccttccgtattcttgtttccgccgaagccgaaggacacgcttatgattagcaggactcccgaagtgacgtgcgtcgtagtcgacgtgtcgcatgaggacccggaggtcaagttcaactggtatgtcgatggcgtagaagtacacaatgcaaagactaaaccccgcgaagaacagtacggttcgacatacagagtagtgagcgtcttgcaggtgctgcacgttgactggctcaacggaaaggagtataagtgtaaagtatcgaataaggcacttcccgcacctatcgagaaaacgatctccaaggctaagggtcagccaagagaaccccaagtctacactctgccccctagccgcgacgagcttacgaaaaaccaggtgtcgctcacttgtttggtgaagggtttctatccgagcgatattgtggtagagtgggaatccaacgggcagccagagaacaattacaagacgacgccaccagtgctggattcggatgggagctttttcttgtactcaaagttgaccgtggataaaagccggtggcagcagggtaatgtgttttcatgctcggtaatgcacgaggccctccataaccattatacgcagaaaagcctttcgctctcacccgggaaa

SEQ ID NO: 525 - DNA, 1140 bp, Artificial Sequence
  source: /note="Description of Artificial Sequence: Synthetic polynucleotide"
gcccctacgtcctcctcaactaaaaagacgcaacttcagcttgagcatcttcttctcgaccttcagatgattttgaacggaatcaataattacaaaaatcctaaacttactgaaatgctcacgtttaagttttatatgccaaaaaaggccactgagttgaaacaccttcaatgcttggaggaggaacttaaaccacttgaggaagccttgaatcttgctccgtccaaaaactttcatttgcggccacgagatctgataaggaacatcaacgtgatcgtcctggaactgaaaggaagcgaaacgacgtttatgtgcgaatatgcagacgaaactgcgacaatcgttgaatttctcaatcgatggatcacttttagccaatctatcatcagcacgttgactggtggtggaggatcgggaggtggaggatctggaggaggaggatcgggtggaggaggatccgataaaactcatacgtgcccaccctgccccgcaccggagctgcttgggggtccttccgtattcttgtttccgccgaagccgaaggacacgcttatgattagcaggactcccgaagtgacgtgcgtcgtagtcgacgtgtcgcatgaggacccggaggtcaagttcaactggtatgtcgatggcgtagaagtacacaatgcaaagactaaaccccgcgaagaacagtacggttcgacatacagagtagtgagcgtcttgcaggtgctgcacgttgactggctcaacggaaaggagtataagtgtaaagtatcgaataaggcacttcccgcacctatcgagaaaacgatctccaaggctaagggtcagccaagagaaccccaagtctacactctgccccctagccgcgacgagcttacgaaaaaccaggtgtcgctcacttgtttggtgaagggtttctatccgagcgatattgtggtagagtgggaatccaacgggcagccagagaacaattacaagacgacgccaccagtgctggattcggatgggagctttttcttgtactcaaagttgaccgtggataaaagccggtggcagcagggtaatgtgttttcatgctcggtaatgcacgaggccctccataaccattatacgcagaaaagcctttcgctctcacccgggaaa

SEQ ID NO: 526 - DNA, 1140 bp, Artificial Sequence
  source: /note="Description of Artificial Sequence: Synthetic polynucleotide"
gcccctacgtcctcctcaactaaaaagacgcaacttcagcttgagcatcttcttctcgaccttcagatgattttgaacggaatcaataattacaaaaatcctaaacttactgaaatgctcacgtttaagttttatatgccaaaaaaggccactgagttgaaacaccttcaatgcttggaggaggaacttaaaccacttgaggaagccttgaatcttgctccgtccaaaaactttcatttgcggccacgagatctgataagcaacatcaacgtgagcgtcctggaactgaaaggaagcgaaacgacgtttatgtgcgaatatgcagacgaaactgcgacaatcgttgaatttctcaatcgatggatcacttttagccaatctatcatcagcacgttgactggtggtggaggatcgggaggtggaggatctggaggaggaggatcgggtggaggaggatccgataaaactcatacgtgcccaccctgccccgcaccggagctgcttgggggtccttccgtattcttgtttccgccgaagccgaaggacacgcttatgattagcaggactcccgaagtgacgtgcgtcgtagtcgacgtgtcgcatgaggacccggaggtcaagttcaactggtatgtcgatggcgtagaagtacacaatgcaaagactaaaccccgcgaagaacagtacggttcgacatacagagtagtgagcgtcttgcaggtgctgcacgttgactggctcaacggaaaggagtataagtgtaaagtatcgaataaggcacttcccgcacctatcgagaaaacgatctccaaggctaagggtcagccaagagaaccccaagtctacactctgccccctagccgcgacgagcttacgaaaaaccaggtgtcgctcacttgtttggtgaagggtttctatccgagcgatattgtggtagagtgggaatccaacgggcagccagagaacaattacaagacgacgccaccagtgctggattcggatgggagctttttcttgtactcaaagttgaccgtggataaaagccggtggcagcagggtaatgtgttttcatgctcggtaatgcacgaggccctccataaccattatacgcagaaaagcctttcgctctcacccgggaaa

SEQ ID NO: 527 - DNA, 1140 bp, Artificial Sequence
  source: /note="Description of Artificial Sequence: Synthetic polynucleotide"
gcccctacgtcctcctcaactaaaaagacgcaacttcagcttgagaaccttcttctcgaccttcagatgattttgaacggaatcaataattacaaaaatcctaaacttactagaatgctcacgcagaagttttatatgccaaaaaaggccactgagttgaaacaccttcaatgcttggaggaggaacttaaaccacttgaggaagccttgaatcttgctccgtccaaaaactttcatttgcggccacgagatctgataagcaacatcaacgtgatcgtcctggaactgaaaggaagcgaaacgacgtttatgtgcgaatatgcagacgaaactgcgacaatcgttgaatttctcaatcgatggatcacttttagccaatctatcatcagcacgttgactggtggtggaggatcgggaggtggaggatctggaggaggaggatcgggtggaggaggatccgataaaactcatacgtgcccaccctgccccgcaccggagctgcttgggggtccttccgtattcttgtttccgccgaagccgaaggacacgcttatgattagcaggactcccgaagtgacgtgcgtcgtagtcgacgtgtcgcatgaggacccggaggtcaagttcaactggtatgtcgatggcgtagaagtacacaatgcaaagactaaaccccgcgaagaacagtacggttcgacatacagagtagtgagcgtcttgcaggtgctgcacgttgactggctcaacggaaaggagtataagtgtaaagtatcgaataaggcacttcccgcacctatcgagaaaacgatctccaaggctaagggtcagccaagagaaccccaagtctacactctgccccctagccgcgacgagcttacgaaaaaccaggtgtcgctcacttgtttggtgaagggtttctatccgagcgatattgtggtagagtgggaatccaacgggcagccagagaacaattacaagacgacgccaccagtgctggattcggatgggagctttttcttgtactcaaagttgaccgtggataaaagccggtggcagcagggtaatgtgttttcatgctcggtaatgcacgaggccctccataaccattatacgcagaaaagcctttcgctctcacccgggaaa

SEQ ID NO: 528 - DNA, 1140 bp, Artificial Sequence
  source: /note="Description of Artificial Sequence: Synthetic polynucleotide"
gcccctacgtcctcctcaactaaaaagacgcaacttcagcttgagcatcttcttctcgaccttcagatgattttgaacggaatcaataattacaaaaatcctaaacttactagaatgctcacgcagaagttttatatgccaaaaaaggccactgagttgaaacaccttcaatgcttggaggaggaacttaaaccacttgaggaagccttgaatcttgctccgtccaaaaactttcatttgcggccacgagatctgataagcaacatcaacgtgagcgtcctggaactgaaaggaagcgaaacgacgtttatgtgcgaatatgcagacgaaactgcgacaatcgttgaatttctcaatcgatggatcacttttagccaatctatcatcagcacgttgactggtggtggaggatcgggaggtggaggatctggaggaggaggatcgggtggaggaggatccgataaaactcatacgtgcccaccctgccccgcaccggagctgcttgggggtccttccgtattcttgtttccgccgaagccgaaggacacgcttatgattagcaggactcccgaagtgacgtgcgtcgtagtcgacgtgtcgcatgaggacccggaggtcaagttcaactggtatgtcgatggcgtagaagtacacaatgcaaagactaaaccccgcgaagaacagtacggttcgacatacagagtagtgagcgtcttgcaggtgctgcacgttgactggctcaacggaaaggagtataagtgtaaagtatcgaataaggcacttcccgcacctatcgagaaaacgatctccaaggctaagggtcagccaagagaaccccaagtctacactctgccccctagccgcgacgagcttacgaaaaaccaggtgtcgctcacttgtttggtgaagggtttctatccgagcgatattgtggtagagtgggaatccaacgggcagccagagaacaattacaagacgacgccaccagtgctggattcggatgggagctttttcttgtactcaaagttgaccgtggataaaagccggtggcagcagggtaatgtgttttcatgctcggtaatgcacgaggccctccataaccattatacgcagaaaagcctttcgctctcacccgggaaa

SEQ ID NO: 529 - DNA, 1140 bp, Artificial Sequence
  source: /note="Description of Artificial Sequence: Synthetic polynucleotide"
gcccctacgtcctcctcaactaaaaagacgcaacttcagcttgagaaccttcttctcgaccttcagatgattttgaacggaatcaataattacaaaaatcctgaacttactaacatgctcacgtttaagttttatatgccaaaaaaggccactgagttgaaacaccttcaatgcttggaggaggaacttaaaccacttgaggaagccttgaatcttgctccgtccaaaaactttcatttgcggccacgagatctgataagcaacatcaacgtgatcgtcctggaactgaaaggaagcgaaacgacgtttatgtgcgaatatgcagacgaaactgcgacaatcgttgaatttctcaatcgatggatcacttttagccaatctatcatcagcacgttgactggtggtggaggatcgggaggtggaggatctggaggaggaggatcgggtggaggaggatccgataaaactcatacgtgcccaccctgccccgcaccggagctgcttgggggtccttccgtattcttgtttccgccgaagccgaaggacacgcttatgattagcaggactcccgaagtgacgtgcgtcgtagtcgacgtgtcgcatgaggacccggaggtcaagttcaactggtatgtcgatggcgtagaagtacacaatgcaaagactaaaccccgcgaagaacagtacggttcgacatacagagtagtgagcgtcttgcaggtgctgcacgttgactggctcaacggaaaggagtataagtgtaaagtatcgaataaggcacttcccgcacctatcgagaaaacgatctccaaggctaagggtcagccaagagaaccccaagtctacactctgccccctagccgcgacgagcttacgaaaaaccaggtgtcgctcacttgtttggtgaagggtttctatccgagcgatattgtggtagagtgggaatccaacgggcagccagagaacaattacaagacgacgccaccagtgctggattcggatgggagctttttcttgtactcaaagttgaccgtggataaaagccggtggcagcagggtaatgtgttttcatgctcggtaatgcacgaggccctccataaccattatacgcagaaaagcctttcgctctcacccgggaaa

SEQ ID NO: 530 - DNA, 1140 bp, Artificial Sequence
  source: /note="Description of Artificial Sequence: Synthetic polynucleotide"
gcccctacgtcctcctcaactaaaaagacgcaacttcagcttgagcatcttcttctcgaccttcagatgattttgaacggaatcaataattacaaaaatcctaaacttactagaatgctcacgtttaagttttatatgccaaaaaaggccactgagttgaaacaccttcaatgcttggaggaggaacttaaaccacttgaggaagtattgaatcttgctcagtccaaaaactttcatttgcggccacgagatctgataagcaacatcaacgtgatcgtcctggaactgaaaggaagcgaaacgacgtttatgtgcgaatatgcagacgaaactgcgacaatcgttgaatttctcaatcgatggatcacttttagccaatctatcatcagcacgttgactggtggtggaggatcgggaggtggaggatctggaggaggaggatcgggtggaggaggatccgataaaactcatacgtgcccaccctgccccgcaccggaggcagcaggtggtccttccgtattcttgtttccgccgaagccgaaggacacgcttatgattagcaggactcccgaagtgacgtgcgtcgtagtcgacgtgtcgcatgaggacccggaggtcaagttcaactggtatgtcgatggcgtagaagtacacaatgcaaagactaaaccccgcgaagaacagtacaattcgacatacagagtagtgagcgtcttgcaggtgctgcacgttgactggctcaacggaaaggagtataagtgtaaagtatcgaataaggcacttggtgcacctatcgagaaaacgatctccaaggctaagggtcagccaagagaaccccaagtctacactctgccccctagccgcgacgagcttacgaaaaaccaggtgtcgctcacttgtttggtgaagggtttctatccgagcgatattgtggtagagtgggaatccaacgggcagccagagaacaattacaagacgacgccaccagtgctggattcggatgggagctttttcttgtactcaaagttgaccgtggataaaagccggtggcagcagggtaatgtgttttcatgctcggtaatgcacgaggccctccataaccattatacgcagaaaagcctttcgctctcacccgggaaa

SEQ ID NO: 531 - DNA, 1140 bp, Artificial Sequence
  source: /note="Description of Artificial Sequence: Synthetic polynucleotide"
gcccctacgtcctcctcaactaaaaagacgcaacttcagcttgagcatcttcttctcgaccttcagatgattttgaacggaatcaataattacaaaaatcctaaacttactagaatgctcacgtttaagttttatatgccaaaaaaggccactgagttgaaacaccttcaatgcttggaggaggaacttaaaccacttgaggaagccttgaatcttgctccgtccaaaaactttcatttgcggccacgagatctgataagcaacatcaacgtgatcgtcctggaactgaaaggaagcgaaacgacgtttatgtgcgaatatgcagacgaaactgcgacaatcgttgaatttctcaatcgatggatcacttttagccaatctatcatcagcacgttgactggtggtggaggatcgggaggtggaggatctggaggaggaggatcgggtggaggaggatccgataaaactcatacgtgcccaccctgccccgcaccggaggcagcaggtggtccttccgtattcttgtttccgccgaagccgaaggacacgcttatgattagcaggactcccgaagtgacgtgcgtcgtagtcgacgtgtcgcatgaggacccggaggtcaagttcaactggtatgtcgatggcgtagaagtacacaatgcaaagactaaaccccgcgaagaacagtacaattcgacatacagagtagtgagcgtcttgcaggtgctgcacgttgactggctcaacggaaaggagtataagtgtaaagtatcgaataaggcacttggtgcacctatcgagaaaacgatctccaaggctaagggtcagccaagagaaccccaagtctacactctgccccctagccgcgacgagcttacgaaaaaccaggtgtcgctcacttgtttggtgaagggtttctatccgagcgatattgtggtagagtgggaatccaacgggcagccagagaacaattacaagacgacgccaccagtgctggattcggatgggagctttttcttgtactcaaagttgaccgtggataaaagccggtggcagcagggtaatgtgttttcatgctcggtaatgcacgaggccctccataaccattatacgcagaaaagcctttcgctctcacccgggaaa

SEQ ID NO: 532 - DNA, 1140 bp, Artificial Sequence
  source: /note="Description of Artificial Sequence: Synthetic polynucleotide"
gcccctacgtcctcctcaactaaaaagacgcaacttcagcttgaggatcttcttctcgaccttcagatgattttgaacggaatcaataattacaaaaatcctaaacttactagaatgctcacgtttaagttttatatgccaaaaaaggccactgagttgaaacaccttcaatgcttggaggaggaacttaaaccacttgaggaagccttgaatcttgctccgtccaaaaactttcatttgcggccacgagatctgataagcaacatcaacgtgatcgtcctggaactgaaaggaagcgaaacgacgtttatgtgcgaatatgcagacgaaactgcgacaatcgttgaatttctcaatcgatggatcacttttagccaatctatcatcagcacgttgactggtggtggaggatcgggaggtggaggatctggaggaggaggatcgggtggaggaggatccgataaaactcatacgtgcccaccctgccccgcaccggaggcagcaggtggtccttccgtattcttgtttccgccgaagccgaaggacacgcttatgattagcaggactcccgaagtgacgtgcgtcgtagtcgacgtgtcgcatgaggacccggaggtcaagttcaactggtatgtcgatggcgtagaagtacacaatgcaaagactaaaccccgcgaagaacagtacaattcgacatacagagtagtgagcgtcttgcaggtgctgcacgttgactggctcaacggaaaggagtataagtgtaaagtatcgaataaggcacttggtgcacctatcgagaaaacgatctccaaggctaagggtcagccaagagaaccccaagtctacactctgccccctagccgcgacgagcttacgaaaaaccaggtgtcgctcacttgtttggtgaagggtttctatccgagcgatattgtggtagagtgggaatccaacgggcagccagagaacaattacaagacgacgccaccagtgctggattcggatgggagctttttcttgtactcaaagttgaccgtggataaaagccggtggcagcagggtaatgtgttttcatgctcggtaatgcacgaggccctccataaccattatacgcagaaaagcctttcgctctcacccgggaaa

SEQ ID NO: 533 - DNA, 1140 bp, Artificial Sequence
  source: /note="Description of Artificial Sequence: Synthetic polynucleotide"
gcccctacgtcctcctcaactaaaaagacgcaacttcagcttgagaatcttcttctcgaccttcagatgattttgaacggaatcaataattacaaaaatcctaaacttactagaatgctcacgtttaagttttatatgccaaaaaaggccactgagttgaaacaccttcaatgcttggaggaggaacttaaaccacttgaggaagccttgaatcttgctccgtccaaaaactttcatttgcggccacgagatctgataagcaacatcaacgtgatcgtcctggaactgaaaggaagcgaaacgacgtttatgtgcgaatatgcagacgaaactgcgacaatcgttgaatttctcaatcgatggatcacttttagccaatctatcatcagcacgttgactggtggtggaggatcgggaggtggaggatctggaggaggaggatcgggtggaggaggatccgataaaactcatacgtgcccaccctgccccgcaccggaggcagcaggtggtccttccgtattcttgtttccgccgaagccgaaggacacgcttatgattagcaggactcccgaagtgacgtgcgtcgtagtcgacgtgtcgcatgaggacccggaggtcaagttcaactggtatgtcgatggcgtagaagtacacaatgcaaagactaaaccccgcgaagaacagtacaattcgacatacagagtagtgagcgtcttgcaggtgctgcacgttgactggctcaacggaaaggagtataagtgtaaagtatcgaataaggcacttggtgcacctatcgagaaaacgatctccaaggctaagggtcagccaagagaaccccaagtctacactctgccccctagccgcgacgagcttacgaaaaaccaggtgtcgctcacttgtttggtgaagggtttctatccgagcgatattgtggtagagtgggaatccaacgggcagccagagaacaattacaagacgacgccaccagtgctggattcggatgggagctttttcttgtactcaaagttgaccgtggataaaagccggtggcagcagggtaatgtgttttcatgctcggtaatgcacgaggccctccataaccattatacgcagaaaagcctttcgctctcacccgggaaa

SEQ ID NO: 534 - DNA, 1140 bp, Artificial Sequence
  source: /note="Description of Artificial Sequence: Synthetic polynucleotide"
gcccctacgtcctcctcaactaaaaagacgcaacttcagcttgagctgcttcttctcgaccttcagatgattttgaacggaatcaataattacaaaaatcctaaacttactagaatgctcacgtttaagttttatatgccaaaaaaggccactgagttgaaacaccttcaatgcttggaggaggaacttaaaccacttgaggaagccttgaatcttgctccgtccaaaaactttcatttgcggccacgagatctgataagcaacatcaacgtgatcgtcctggaactgaaaggaagcgaaacgacgtttatgtgcgaatatgcagacgaaactgcgacaatcgttgaatttctcaatcgatggatcacttttagccaatctatcatcagcacgttgactggtggtggaggatcgggaggtggaggatctggaggaggaggatcgggtggaggaggatccgataaaactcatacgtgcccaccctgccccgcaccggaggcagcaggtggtccttccgtattcttgtttccgccgaagccgaaggacacgcttatgattagcaggactcccgaagtgacgtgcgtcgtagtcgacgtgtcgcatgaggacccggaggtcaagttcaactggtatgtcgatggcgtagaagtacacaatgcaaagactaaaccccgcgaagaacagtacaattcgacatacagagtagtgagcgtcttgcaggtgctgcacgttgactggctcaacggaaaggagtataagtgtaaagtatcgaataaggcacttggtgcacctatcgagaaaacgatctccaaggctaagggtcagccaagagaaccccaagtctacactctgccccctagccgcgacgagcttacgaaaaaccaggtgtcgctcacttgtttggtgaagggtttctatccgagcgatattgtggtagagtgggaatccaacgggcagccagagaacaattacaagacgacgccaccagtgctggattcggatgggagctttttcttgtactcaaagttgaccgtggataaaagccggtggcagcagggtaatgtgttttcatgctcggtaatgcacgaggccctccataaccattatacgcagaaaagcctttcgctctcacccgggaaa

SEQ ID NO: 535 - DNA, 1140 bp, Artificial Sequence
  source: /note="Description of Artificial Sequence: Synthetic polynucleotide"
gcccctacgtcctcctcaactaaaaagacgcaacttcagcttgagcatcttcttctcgaccttcagatgattttgaacggaaccaataattacaaaaatcctaaacttactagaatgctcacgtttaagttttatatgccaaaaaaggccactgagttgaaacaccttcaatgcttggaggaggaacttaaaccacttgaggaagccttgaatcttgctccgtccaaaaactttcatttgcggccacgagatctgataagcaacatcaacgtgatcgtcctggaactgaaaggaagcgaaacgacgtttatgtgcgaatatgcagacgaaactgcgacaatcgttgaatttctcaatcgatggatcacttttagccaatctatcatcagcacgttgactggtggtggaggatcgggaggtggaggatctggaggaggaggatcgggtggaggaggatccgataaaactcatacgtgcccaccctgccccgcaccggaggcagcaggtggtccttccgtattcttgtttccgccgaagccgaaggacacgcttatgattagcaggactcccgaagtgacgtgcgtcgtagtcgacgtgtcgcatgaggacccggaggtcaagttcaactggtatgtcgatggcgtagaagtacacaatgcaaagactaaaccccgcgaagaacagtacaattcgacatacagagtagtgagcgtcttgcaggtgctgcacgttgactggctcaacggaaaggagtataagtgtaaagtatcgaataaggcacttggtgcacctatcgagaaaacgatctccaaggctaagggtcagccaagagaaccccaagtctacactctgccccctagccgcgacgagcttacgaaaaaccaggtgtcgctcacttgtttggtgaagggtttctatccgagcgatattgtggtagagtgggaatccaacgggcagccagagaacaattacaagacgacgccaccagtgctggattcggatgggagctttttcttgtactcaaagttgaccgtggataaaagccggtggcagcagggtaatgtgttttcatgctcggtaatgcacgaggccctccataaccattatacgcagaaaagcctttcgctctcacccgggaaa

SEQ ID NO: 536 - DNA, 1140 bp, Artificial Sequence
  source: /note="Description of Artificial Sequence: Synthetic polynucleotide"
gcccctacgtcctcctcaactaaaaagacgcaacttcagcttgagcatcttcttctcgaccttcagatgattttgaacggaatcaataattacaaaaatcctaaacttactagaatgctcacgtttaagttttatatgccaaaaaaggccactgagttgaaacaccttcaatgcttggaggaggaacttaaaccacttgaggaagccttgaatcttgctccgtccaaaaactttcatttgcggccacgagttctgataagcaacatcaacgtgatcgtcctggaactgaaaggaagcgaaacgacgtttatgtgcgaatatgcagacgaaactgcgacaatcgttgaatttctcaatcgatggatcacttttagccaatctatcatcagcacgttgactggtggtggaggatcgggaggtggaggatctggaggaggaggatcgggtggaggaggatccgataaaactcatacgtgcccaccctgccccgcaccggaggcagcaggtggtccttccgtattcttgtttccgccgaagccgaaggacacgcttatgattagcaggactcccgaagtgacgtgcgtcgtagtcgacgtgtcgcatgaggacccggaggtcaagttcaactggtatgtcgatggcgtagaagtacacaatgcaaagactaaaccccgcgaagaacagtacaattcgacatacagagtagtgagcgtcttgcaggtgctgcacgttgactggctcaacggaaaggagtataagtgtaaagtatcgaataaggcacttggtgcacctatcgagaaaacgatctccaaggctaagggtcagccaagagaaccccaagtctacactctgccccctagccgcgacgagcttacgaaaaaccaggtgtcgctcacttgtttggtgaagggtttctatccgagcgatattgtggtagagtgggaatccaacgggcagccagagaacaattacaagacgacgccaccagtgctggattcggatgggagctttttcttgtactcaaagttgaccgtggataaaagccggtggcagcagggtaatgtgttttcatgctcggtaatgcacgaggccctccataaccattatacgcagaaaagcctttcgctctcacccgggaaa

SEQ ID NO: 537 - DNA, 1140 bp, Artificial Sequence
  source: /note="Description of Artificial Sequence: Synthetic polynucleotide"
gcccctacgtcctcctcaactaaaaagacgcaacttcagcttgagcatcttcttctcgaccttcagatgattttgaacggaatcaataattacaaaaatcctaaacttactagaatgctcacgtttaagttttatatgccaaaaaaggccactgagttgaaacaccttcaatgcttggaggaggaacttaaaccacttgaggaagccttgaatcttgctccgtccaaaaactttcatttgcggccacgagatctgatacgtaacatcaacgtgatcgtcctggaactgaaaggaagcgaaacgacgtttatgtgcgaatatgcagacgaaactgcgacaatcgttgaatttctcaatcgatggatcacttttagccaatctatcatcagcacgttgactggtggtggaggatcgggaggtggaggatctggaggaggaggatcgggtggaggaggatccgataaaactcatacgtgcccaccctgccccgcaccggaggcagcaggtggtccttccgtattcttgtttccgccgaagccgaaggacacgcttatgattagcaggactcccgaagtgacgtgcgtcgtagtcgacgtgtcgcatgaggacccggaggtcaagttcaactggtatgtcgatggcgtagaagtacacaatgcaaagactaaaccccgcgaagaacagtacaattcgacatacagagtagtgagcgtcttgcaggtgctgcacgttgactggctcaacggaaaggagtataagtgtaaagtatcgaataaggcacttggtgcacctatcgagaaaacgatctccaaggctaagggtcagccaagagaaccccaagtctacactctgccccctagccgcgacgagcttacgaaaaaccaggtgtcgctcacttgtttggtgaagggtttctatccgagcgatattgtggtagagtgggaatccaacgggcagccagagaacaattacaagacgacgccaccagtgctggattcggatgggagctttttcttgtactcaaagttgaccgtggataaaagccggtggcagcagggtaatgtgttttcatgctcggtaatgcacgaggccctccataaccattatacgcagaaaagcctttcgctctcacccgggaaa

SEQ ID NO: 538 - DNA, 1140 bp, Artificial Sequence
  source: /note="Description of Artificial Sequence: Synthetic polynucleotide"
gcccctacgtcctcctcaactaaaaagacgcaacttcagcttgagcatcttcttctcgaccttcagatgattttgaacggaatcaataattacaaaaatcctaaacttactagaatgctcacgtttaagttttatatgccaaaaaaggccactgagttgaaacaccttcaatgcttggaggaggaacttaaaccacttgaggaagccttgaatcttgctccgtccaaaaactttcatttgcggccacgagatctgataagcctgatcaacgtgatcgtcctggaactgaaaggaagcgaaacgacgtttatgtgcgaatatgcagacgaaactgcgacaatcgttgaatttctcaatcgatggatcacttttagccaatctatcatcagcacgttgactggtggtggaggatcgggaggtggaggatctggaggaggaggatcgggtggaggaggatccgataaaactcatacgtgcccaccctgccccgcaccggaggcagcaggtggtccttccgtattcttgtttccgccgaagccgaaggacacgcttatgattagcaggactcccgaagtgacgtgcgtcgtagtcgacgtgtcgcatgaggacccggaggtcaagttcaactggtatgtcgatggcgtagaagtacacaatgcaaagactaaaccccgcgaagaacagtacaattcgacatacagagtagtgagcgtcttgcaggtgctgcacgttgactggctcaacggaaaggagtataagtgtaaagtatcgaataaggcacttggtgcacctatcgagaaaacgatctccaaggctaagggtcagccaagagaaccccaagtctacactctgccccctagccgcgacgagcttacgaaaaaccaggtgtcgctcacttgtttggtgaagggtttctatccgagcgatattgtggtagagtgggaatccaacgggcagccagagaacaattacaagacgacgccaccagtgctggattcggatgggagctttttcttgtactcaaagttgaccgtggataaaagccggtggcagcagggtaatgtgttttcatgctcggtaatgcacgaggccctccataaccattatacgcagaaaagcctttcgctctcacccgggaaa

SEQ ID NO: 539 - DNA, 1140 bp, Artificial Sequence
  source: /note="Description of Artificial Sequence: Synthetic polynucleotide"
gcccctacgtcctcctcaactaaaaagacgcaacttcagcttgagcatcttcttctcgaccttcagatgattttgaacggaatcaataattacaaaaatcctaaacttactagaatgctcacgtttaagttttatatgccaaaaaaggccactgagttgaaacaccttcaatgcttggaggaggaacttaaaccacttgaggaagccttgaatcttgctccgtccaaaaactttcatttgcggccacgagatctgataagcagcatcaacgtgatcgtcctggaactgaaaggaagcgaaacgacgtttatgtgcgaatatgcagacgaaactgcgacaatcgttgaatttctcaatcgatggatcacttttagccaatctatcatcagcacgttgactggtggtggaggatcgggaggtggaggatctggaggaggaggatcgggtggaggaggatccgataaaactcatacgtgcccaccctgccccgcaccggaggcagcaggtggtccttccgtattcttgtttccgccgaagccgaaggacacgcttatgattagcaggactcccgaagtgacgtgcgtcgtagtcgacgtgtcgcatgaggacccggaggtcaagttcaactggtatgtcgatggcgtagaagtacacaatgcaaagactaaaccccgcgaagaacagtacaattcgacatacagagtagtgagcgtcttgcaggtgctgcacgttgactggctcaacggaaaggagtataagtgtaaagtatcgaataaggcacttggtgcacctatcgagaaaacgatctccaaggctaagggtcagccaagagaaccccaagtctacactctgccccctagccgcgacgagcttacgaaaaaccaggtgtcgctcacttgtttggtgaagggtttctatccgagcgatattgtggtagagtgggaatccaacgggcagccagagaacaattacaagacgacgccaccagtgctggattcggatgggagctttttcttgtactcaaagttgaccgtggataaaagccggtggcagcagggtaatgtgttttcatgctcggtaatgcacgaggccctccataaccattatacgcagaaaagcctttcgctctcacccgggaaa

SEQ ID NO: 540 - DNA, 1140 bp, Artificial Sequence
  source: /note="Description of Artificial Sequence: Synthetic polynucleotide"
gcccctacgtcctcctcaactaaaaagacgcaacttcagcttgagcatcttcttctcgaccttcagatgattttgaacggaatcaataattacaaaaatcctaaacttactagaatgctcacgtttaagttttatatgccaaaaaaggccactgagttgaaacaccttcaatgcttggaggaggaacttaaaccacttgaggaagccttgaatcttgctccgtccaaaaactttcatttgcggccacgagatctgataagcaacatcaacgtgagcgtcctggaactgaaaggaagcgaaacgacgtttatgtgcgaatatgcagacgaaactgcgacaatcgttgaatttctcaatcgatggatcacttttagccaatctatcatcagcacgttgactggtggtggaggatcgggaggtggaggatctggaggaggaggatcgggtggaggaggatccgataaaactcatacgtgcccaccctgccccgcaccggaggcagcaggtggtccttccgtattcttgtttccgccgaagccgaaggacacgcttatgattagcaggactcccgaagtgacgtgcgtcgtagtcgacgtgtcgcatgaggacccggaggtcaagttcaactggtatgtcgatggcgtagaagtacacaatgcaaagactaaaccccgcgaagaacagtacaattcgacatacagagtagtgagcgtcttgcaggtgctgcacgttgactggctcaacggaaaggagtataagtgtaaagtatcgaataaggcacttggtgcacctatcgagaaaacgatctccaaggctaagggtcagccaagagaaccccaagtctacactctgccccctagccgcgacgagcttacgaaaaaccaggtgtcgctcacttgtttggtgaagggtttctatccgagcgatattgtggtagagtgggaatccaacgggcagccagagaacaattacaagacgacgccaccagtgctggattcggatgggagctttttcttgtactcaaagttgaccgtggataaaagccggtggcagcagggtaatgtgttttcatgctcggtaatgcacgaggccctccataaccattatacgcagaaaagcctttcgctctcacccgggaaa

SEQ ID NO: 541 - DNA, 1140 bp, Artificial Sequence
  source: /note="Description of Artificial Sequence: Synthetic polynucleotide"
gcccctacgtcctcctcaactaaaaagacgcaacttcagcttgagcatcttcttctcgaccttcagatgattttgaacggaatcaataattacaaaaatcctgaacttactagaatgctcacgtttaagttttatatgccaaaaaaggccactgagttgaaacaccttcaatgcttggaggaggaacttaaaccacttgaggaagccttgaatcttgctccgtccaaaaactttcatttgcggccacgagatctgataagcaacatcaacgtgatcgtcctggaactgaaaggaagcgaaacgacgtttatgtgcgaatatgcagacgaaactgcgacaatcgttgaatttctcaatcgatggatcacttttagccaatctatcatcagcacgttgactggtggtggaggatcgggaggtggaggatctggaggaggaggatcgggtggaggaggatccgataaaactcatacgtgcccaccctgccccgcaccggaggcagcaggtggtccttccgtattcttgtttccgccgaagccgaaggacacgcttatgattagcaggactcccgaagtgacgtgcgtcgtagtcgacgtgtcgcatgaggacccggaggtcaagttcaactggtatgtcgatggcgtagaagtacacaatgcaaagactaaaccccgcgaagaacagtacaattcgacatacagagtagtgagcgtcttgcaggtgctgcacgttgactggctcaacggaaaggagtataagtgtaaagtatcgaataaggcacttggtgcacctatcgagaaaacgatctccaaggctaagggtcagccaagagaaccccaagtctacactctgccccctagccgcgacgagcttacgaaaaaccaggtgtcgctcacttgtttggtgaagggtttctatccgagcgatattgtggtagagtgggaatccaacgggcagccagagaacaattacaagacgacgccaccagtgctggattcggatgggagctttttcttgtactcaaagttgaccgtggataaaagccggtggcagcagggtaatgtgttttcatgctcggtaatgcacgaggccctccataaccattatacgcagaaaagcctttcgctctcacccgggaaa

SEQ ID NO: 542 - DNA, 1140 bp, Artificial Sequence
  source: /note="Description of Artificial Sequence: Synthetic polynucleotide"
gcccctacgtcctcctcaactaaaaagacgcaacttcagcttgagaaccttcttctcgaccttcagatgattttgaacggaatcaataattacaaaaatcctgaacttactagaatgctcacgtttaagttttatatgccaaaaaaggccactgagttgaaacaccttcaatgcttggaggaggaacttaaaccacttgaggaagccttgaatcttgctccgtccaaaaactttcatttgcggccacgagatctgataagcaacatcaacgtgatcgtcctggaactgaaaggaagcgaaacgacgtttatgtgcgaatatgcagacgaaactgcgacaatcgttgaatttctcaatcgatggatcacttttagccaatctatcatcagcacgttgactggtggtggaggatcgggaggtggaggatctggaggaggaggatcgggtggaggaggatccgataaaactcatacgtgcccaccctgccccgcaccggaggcagcaggtggtccttccgtattcttgtttccgccgaagccgaaggacacgcttatgattagcaggactcccgaagtgacgtgcgtcgtagtcgacgtgtcgcatgaggacccggaggtcaagttcaactggtatgtcgatggcgtagaagtacacaatgcaaagactaaaccccgcgaagaacagtacaattcgacatacagagtagtgagcgtcttgcaggtgctgcacgttgactggctcaacggaaaggagtataagtgtaaagtatcgaataaggcacttggtgcacctatcgagaaaacgatctccaaggctaagggtcagccaagagaaccccaagtctacactctgccccctagccgcgacgagcttacgaaaaaccaggtgtcgctcacttgtttggtgaagggtttctatccgagcgatattgtggtagagtgggaatccaacgggcagccagagaacaattacaagacgacgccaccagtgctggattcggatgggagctttttcttgtactcaaagttgaccgtggataaaagccggtggcagcagggtaatgtgttttcatgctcggtaatgcacgaggccctccataaccattatacgcagaaaagcctttcgctctcacccgggaaa

SEQ ID NO: 543 - DNA, 1140 bp, Artificial Sequence
  source: /note="Description of Artificial Sequence: Synthetic polynucleotide"
gcccctacgtcctcctcaactaaaaagacgcaacttcagcttgagctgcttcttctcgaccttcagatgattttgaacggaatcaataattacaaaaatcctgaacttactagaatgctcacgtttaagttttatatgccaaaaaaggccactgagttgaaacaccttcaatgcttggaggaggaacttaaaccacttgaggaagccttgaatcttgctccgtccaaaaactttcatttgcggccacgagatctgataagcaacatcaacgtgatcgtcctggaactgaaaggaagcgaaacgacgtttatgtgcgaatatgcagacgaaactgcgacaatcgttgaatttctcaatcgatggatcacttttagccaatctatcatcagcacgttgactggtggtggaggatcgggaggtggaggatctggaggaggaggatcgggtggaggaggatccgataaaactcatacgtgcccaccctgccccgcaccggaggcagcaggtggtccttccgtattcttgtttccgccgaagccgaaggacacgcttatgattagcaggactcccgaagtgacgtgcgtcgtagtcgacgtgtcgcatgaggacccggaggtcaagttcaactggtatgtcgatggcgtagaagtacacaatgcaaagactaaaccccgcgaagaacagtacaattcgacatacagagtagtgagcgtcttgcaggtgctgcacgttgactggctcaacggaaaggagtataagtgtaaagtatcgaataaggcacttggtgcacctatcgagaaaacgatctccaaggctaagggtcagccaagagaaccccaagtctacactctgccccctagccgcgacgagcttacgaaaaaccaggtgtcgctcacttgtttggtgaagggtttctatccgagcgatattgtggtagagtgggaatccaacgggcagccagagaacaattacaagacgacgccaccagtgctggattcggatgggagctttttcttgtactcaaagttgaccgtggataaaagccggtggcagcagggtaatgtgttttcatgctcggtaatgcacgaggccctccataaccattatacgcagaaaagcctttcgctctcacccgggaaa

SEQ ID NO: 544 - DNA, 1140 bp, Artificial Sequence
  source: /note="Description of Artificial Sequence: Synthetic polynucleotide"
gcccctacgtcctcctcaactaaaaagacgcaacttcagcttgagcatcttcttctcgaccttcagatgattttgaacggaatcaataattacaaaaatcctgaacttactagaatgctcacgtttaagttttatatgccaaaaaaggccactgagttgaaacaccttcaatgcttggaggaggaacttaaaccacttgaggaagccttgaatcttgctccgtccaaaaactttcatttgcggccacgagtgctgataagcaacatcaacgtgatcgtcctggaactgaaaggaagcgaaacgacgtttatgtgcgaatatgcagacgaaactgcgacaatcgttgaatttctcaatcgatggatcacttttagccaatctatcatcagcacgttgactggtggtggaggatcgggaggtggaggatctggaggaggaggatcgggtggaggaggatccgataaaactcatacgtgcccaccctgccccgcaccggaggcagcaggtggtccttccgtattcttgtttccgccgaagccgaaggacacgcttatgattagcaggactcccgaagtgacgtgcgtcgtagtcgacgtgtcgcatgaggacccggaggtcaagttcaactggtatgtcgatggcgtagaagtacacaatgcaaagactaaaccccgcgaagaacagtacaattcgacatacagagtagtgagcgtcttgcaggtgctgcacgttgactggctcaacggaaaggagtataagtgtaaagtatcgaataaggcacttggtgcacctatcgagaaaacgatctccaaggctaagggtcagccaagagaaccccaagtctacactctgccccctagccgcgacgagcttacgaaaaaccaggtgtcgctcacttgtttggtgaagggtttctatccgagcgatattgtggtagagtgggaatccaacgggcagccagagaacaattacaagacgacgccaccagtgctggattcggatgggagctttttcttgtactcaaagttgaccgtggataaaagccggtggcagcagggtaatgtgttttcatgctcggtaatgcacgaggccctccataaccattatacgcagaaaagcctttcgctctcacccgggaaa

SEQ ID NO: 545 - DNA, 1140 bp, Artificial Sequence
  source: /note="Description of Artificial Sequence: Synthetic polynucleotide"
gcccctacgtcctcctcaactaaaaagacgcaacttcagcttgagcatcttcttctcgaccttcagatgattttgaacggaatcaataattacaaaaatcctgaacttactagaatgctcacgtttaagttttatatgccaaaaaaggccactgagttgaaacaccttcaatgcttggaggaggaacttaaaccacttgaggaagccttgaatcttgctccgtccaaaaactttcatttgcggccacgagatctgataagcaacatcaacgtgagcgtcctggaactgaaaggaagcgaaacgacgtttatgtgcgaatatgcagacgaaactgcgacaatcgttgaatttctcaatcgatggatcacttttagccaatctatcatcagcacgttgactggtggtggaggatcgggaggtggaggatctggaggaggaggatcgggtggaggaggatccgataaaactcatacgtgcccaccctgccccgcaccggaggcagcaggtggtccttccgtattcttgtttccgccgaagccgaaggacacgcttatgattagcaggactcccgaagtgacgtgcgtcgtagtcgacgtgtcgcatgaggacccggaggtcaagttcaactggtatgtcgatggcgtagaagtacacaatgcaaagactaaaccccgcgaagaacagtacaattcgacatacagagtagtgagcgtcttgcaggtgctgcacgttgactggctcaacggaaaggagtataagtgtaaagtatcgaataaggcacttggtgcacctatcgagaaaacgatctccaaggctaagggtcagccaagagaaccccaagtctacactctgccccctagccgcgacgagcttacgaaaaaccaggtgtcgctcacttgtttggtgaagggtttctatccgagcgatattgtggtagagtgggaatccaacgggcagccagagaacaattacaagacgacgccaccagtgctggattcggatgggagctttttcttgtactcaaagttgaccgtggataaaagccggtggcagcagggtaatgtgttttcatgctcggtaatgcacgaggccctccataaccattatacgcagaaaagcctttcgctctcacccgggaaa

SEQ ID NO: 546 - DNA, 1140 bp, Artificial Sequence
  source: /note="Description of Artificial Sequence: Synthetic polynucleotide"
gcccctacgtcctcctcaactaaaaagacgcaacttcagcttgagcatcttcttctcgaccttcagatgattttgaacggaatcaataattacaaaaatcctaaacttactcagatgctcacgtttaagttttatatgccaaaaaaggccactgagttgaaacaccttcaatgcttggaggaggaacttaaaccacttgaggaagccttgaatcttgctccgtccaaaaactttcatttgcggccacgagatctgataagcaacatcaacgtgatcgtcctggaactgaaaggaagcgaaacgacgtttatgtgcgaatatgcagacgaaactgcgacaatcgttgaatttctcaatcgatggatcacttttagccaatctatcatcagcacgttgactggtggtggaggatcgggaggtggaggatctggaggaggaggatcgggtggaggaggatccgataaaactcatacgtgcccaccctgccccgcaccggaggcagcaggtggtccttccgtattcttgtttccgccgaagccgaaggacacgcttatgattagcaggactcccgaagtgacgtgcgtcgtagtcgacgtgtcgcatgaggacccggaggtcaagttcaactggtatgtcgatggcgtagaagtacacaatgcaaagactaaaccccgcgaagaacagtacaattcgacatacagagtagtgagcgtcttgcaggtgctgcacgttgactggctcaacggaaaggagtataagtgtaaagtatcgaataaggcacttggtgcacctatcgagaaaacgatctccaaggctaagggtcagccaagagaaccccaagtctacactctgccccctagccgcgacgagcttacgaaaaaccaggtgtcgctcacttgtttggtgaagggtttctatccgagcgatattgtggtagagtgggaatccaacgggcagccagagaacaattacaagacgacgccaccagtgctggattcggatgggagctttttcttgtactcaaagttgaccgtggataaaagccggtggcagcagggtaatgtgttttcatgctcggtaatgcacgaggccctccataaccattatacgcagaaaagcctttcgctctcacccgggaaa

SEQ ID NO: 547 - DNA, 1140 bp, Artificial Sequence
  source: /note="Description of Artificial Sequence: Synthetic polynucleotide"
gcccctacgtcctcctcaactaaaaagacgcaacttcagcttgagaaccttcttctcgaccttcagatgattttgaacggaatcaataattacaaaaatcctaaacttactcagatgctcacgtttaagttttatatgccaaaaaaggccactgagttgaaacaccttcaatgcttggaggaggaacttaaaccacttgaggaagccttgaatcttgctccgtccaaaaactttcatttgcggccacgagatctgataagcaacatcaacgtgatcgtcctggaactgaaaggaagcgaaacgacgtttatgtgcgaatatgcagacgaaactgcgacaatcgttgaatttctcaatcgatggatcacttttagccaatctatcatcagcacgttgactggtggtggaggatcgggaggtggaggatctggaggaggaggatcgggtggaggaggatccgataaaactcatacgtgcccaccctgccccgcaccggaggcagcaggtggtccttccgtattcttgtttccgccgaagccgaaggacacgcttatgattagcaggactcccgaagtgacgtgcgtcgtagtcgacgtgtcgcatgaggacccggaggtcaagttcaactggtatgtcgatggcgtagaagtacacaatgcaaagactaaaccccgcgaagaacagtacaattcgacatacagagtagtgagcgtcttgcaggtgctgcacgttgactggctcaacggaaaggagtataagtgtaaagtatcgaataaggcacttggtgcacctatcgagaaaacgatctccaaggctaagggtcagccaagagaaccccaagtctacactctgccccctagccgcgacgagcttacgaaaaaccaggtgtcgctcacttgtttggtgaagggtttctatccgagcgatattgtggtagagtgggaatccaacgggcagccagagaacaattacaagacgacgccaccagtgctggattcggatgggagctttttcttgtactcaaagttgaccgtggataaaagccggtggcagcagggtaatgtgttttcatgctcggtaatgcacgaggccctccataaccattatacgcagaaaagcctttcgctctcacccgggaaa

SEQ ID NO: 548 - DNA, 1140 bp, Artificial Sequence
  source: /note="Description of Artificial Sequence: Synthetic polynucleotide"
gcccctacgtcctcctcaactaaaaagacgcaacttcagcttgagctgcttcttctcgaccttcagatgattttgaacggaatcaataattacaaaaatcctaaacttactcagatgctcacgtttaagttttatatgccaaaaaaggccactgagttgaaacaccttcaatgcttggaggaggaacttaaaccacttgaggaagccttgaatcttgctccgtccaaaaactttcatttgcggccacgagatctgataagcaacatcaacgtgatcgtcctggaactgaaaggaagcgaaacgacgtttatgtgcgaatatgcagacgaaactgcgacaatcgttgaatttctcaatcgatggatcacttttagccaatctatcatcagcacgttgactggtggtggaggatcgggaggtggaggatctggaggaggaggatcgggtggaggaggatccgataaaactcatacgtgcccaccctgccccgcaccggaggcagcaggtggtccttccgtattcttgtttccgccgaagccgaaggacacgcttatgattagcaggactcccgaagtgacgtgcgtcgtagtcgacgtgtcgcatgaggacccggaggtcaagttcaactggtatgtcgatggcgtagaagtacacaatgcaaagactaaaccccgcgaagaacagtacaattcgacatacagagtagtgagcgtcttgcaggtgctgcacgttgactggctcaacggaaaggagtataagtgtaaagtatcgaataaggcacttggtgcacctatcgagaaaacgatctccaaggctaagggtcagccaagagaaccccaagtctacactctgccccctagccgcgacgagcttacgaaaaaccaggtgtcgctcacttgtttggtgaagggtttctatccgagcgatattgtggtagagtgggaatccaacgggcagccagagaacaattacaagacgacgccaccagtgctggattcggatgggagctttttcttgtactcaaagttgaccgtggataaaagccggtggcagcagggtaatgtgttttcatgctcggtaatgcacgaggccctccataaccattatacgcagaaaagcctttcgctctcacccgggaaa

SEQ ID NO: 549 - DNA, 1140 bp, Artificial Sequence
  source: /note="Description of Artificial Sequence: Synthetic polynucleotide"
gcccctacgtcctcctcaactaaaaagacgcaacttcagcttgagcatcttcttctcgaccttcagatgattttgaacggaatcaataattacaaaaatcctaaacttactcagatgctcacgtttaagttttatatgccaaaaaaggccactgagttgaaacaccttcaatgcttggaggaggaacttaaaccacttgaggaagccttgaatcttgctccgtccaaaaactttcatttgcggccacgagtgctgataagcaacatcaacgtgatcgtcctggaactgaaaggaagcgaaacgacgtttatgtgcgaatatgcagacgaaactgcgacaatcgttgaatttctcaatcgatggatcacttttagccaatctatcatcagcacgttgactggtggtggaggatcgggaggtggaggatctggaggaggaggatcgggtggaggaggatccgataaaactcatacgtgcccaccctgccccgcaccggaggcagcaggtggtccttccgtattcttgtttccgccgaagccgaaggacacgcttatgattagcaggactcccgaagtgacgtgcgtcgtagtcgacgtgtcgcatgaggacccggaggtcaagttcaactggtatgtcgatggcgtagaagtacacaatgcaaagactaaaccccgcgaagaacagtacaattcgacatacagagtagtgagcgtcttgcaggtgctgcacgttgactggctcaacggaaaggagtataagtgtaaagtatcgaataaggcacttggtgcacctatcgagaaaacgatctccaaggctaagggtcagccaagagaaccccaagtctacactctgccccctagccgcgacgagcttacgaaaaaccaggtgtcgctcacttgtttggtgaagggtttctatccgagcgatattgtggtagagtgggaatccaacgggcagccagagaacaattacaagacgacgccaccagtgctggattcggatgggagctttttcttgtactcaaagttgaccgtggataaaagccggtggcagcagggtaatgtgttttcatgctcggtaatgcacgaggccctccataaccattatacgcagaaaagcctttcgctctcacccgggaaa

SEQ ID NO: 550 - DNA, 1140 bp, Artificial Sequence
  source: /note="Description of Artificial Sequence: Synthetic polynucleotide"
gcccctacgtcctcctcaactaaaaagacgcaacttcagcttgagcatcttcttctcgaccttcagatgattttgaacggaatcaataattacaaaaatcctaaacttactcagatgctcacgtttaagttttatatgccaaaaaaggccactgagttgaaacaccttcaatgcttggaggaggaacttaaaccacttgaggaagccttgaatcttgctccgtccaaaaactttcatttgcggccacgagatctgataagcaacatcaacgtgagcgtcctggaactgaaaggaagcgaaacgacgtttatgtgcgaatatgcagacgaaactgcgacaatcgttgaatttctcaatcgatggatcacttttagccaatctatcatcagcacgttgactggtggtggaggatcgggaggtggaggatctggaggaggaggatcgggtggaggaggatccgataaaactcatacgtgcccaccctgccccgcaccggaggcagcaggtggtccttccgtattcttgtttccgccgaagccgaaggacacgcttatgattagcaggactcccgaagtgacgtgcgtcgtagtcgacgtgtcgcatgaggacccggaggtcaagttcaactggtatgtcgatggcgtagaagtacacaatgcaaagactaaaccccgcgaagaacagtacaattcgacatacagagtagtgagcgtcttgcaggtgctgcacgttgactggctcaacggaaaggagtataagtgtaaagtatcgaataaggcacttggtgcacctatcgagaaaacgatctccaaggctaagggtcagccaagagaaccccaagtctacactctgccccctagccgcgacgagcttacgaaaaaccaggtgtcgctcacttgtttggtgaagggtttctatccgagcgatattgtggtagagtgggaatccaacgggcagccagagaacaattacaagacgacgccaccagtgctggattcggatgggagctttttcttgtactcaaagttgaccgtggataaaagccggtggcagcagggtaatgtgttttcatgctcggtaatgcacgaggccctccataaccattatacgcagaaaagcctttcgctctcacccgggaaa

SEQ ID NO: 551 - DNA, 1140 bp, Artificial Sequence
  source: /note="Description of Artificial Sequence: Synthetic polynucleotide"
gcccctacgtcctcctcaactaaaaagacgcaacttcagcttgagcatcttcttctcgaccttcagatgattttgaacggaatcaataattacaaaaatcctaaacttactaacatgctcacgtttaagttttatatgccaaaaaaggccactgagttgaaacaccttcaatgcttggaggaggaacttaaaccacttgaggaagccttgaatcttgctccgtccaaaaactttcatttgcggccacgagatctgataagcaacatcaacgtgatcgtcctggaactgaaaggaagcgaaacgacgtttatgtgcgaatatgcagacgaaactgcgacaatcgttgaatttctcaatcgatggatcacttttagccaatctatcatcagcacgttgactggtggtggaggatcgggaggtggaggatctggaggaggaggatcgggtggaggaggatccgataaaactcatacgtgcccaccctgccccgcaccggaggcagcaggtggtccttccgtattcttgtttccgccgaagccgaaggacacgcttatgattagcaggactcccgaagtgacgtgcgtcgtagtcgacgtgtcgcatgaggacccggaggtcaagttcaactggtatgtcgatggcgtagaagtacacaatgcaaagactaaaccccgcgaagaacagtacaattcgacatacagagtagtgagcgtcttgcaggtgctgcacgttgactggctcaacggaaaggagtataagtgtaaagtatcgaataaggcacttggtgcacctatcgagaaaacgatctccaaggctaagggtcagccaagagaaccccaagtctacactctgccccctagccgcgacgagcttacgaaaaaccaggtgtcgctcacttgtttggtgaagggtttctatccgagcgatattgtggtagagtgggaatccaacgggcagccagagaacaattacaagacgacgccaccagtgctggattcggatgggagctttttcttgtactcaaagttgaccgtggataaaagccggtggcagcagggtaatgtgttttcatgctcggtaatgcacgaggccctccataaccattatacgcagaaaagcctttcgctctcacccgggaaa

SEQ ID NO: 552 - DNA, 1140 bp, Artificial Sequence
  source: /note="Description of Artificial Sequence: Synthetic polynucleotide"
gcccctacgtcctcctcaactaaaaagacgcaacttcagcttgagaaccttcttctcgaccttcagatgattttgaacggaatcaataattacaaaaatcctaaacttactaacatgctcacgtttaagttttatatgccaaaaaaggccactgagttgaaacaccttcaatgcttggaggaggaacttaaaccacttgaggaagccttgaatcttgctccgtccaaaaactttcatttgcggccacgagatctgataagcaacatcaacgtgatcgtcctggaactgaaaggaagcgaaacgacgtttatgtgcgaatatgcagacgaaactgcgacaatcgttgaatttctcaatcgatggatcacttttagccaatctatcatcagcacgttgactggtggtggaggatcgggaggtggaggatctggaggaggaggatcgggtggaggaggatccgataaaactcatacgtgcccaccctgccccgcaccggaggcagcaggtggtccttccgtattcttgtttccgccgaagccgaaggacacgcttatgattagcaggactcccgaagtgacgtgcgtcgtagtcgacgtgtcgcatgaggacccggaggtcaagttcaactggtatgtcgatggcgtagaagtacacaatgcaaagactaaaccccgcgaagaacagtacaattcgacatacagagtagtgagcgtcttgcaggtgctgcacgttgactggctcaacggaaaggagtataagtgtaaagtatcgaataaggcacttggtgcacctatcgagaaaacgatctccaaggctaagggtcagccaagagaaccccaagtctacactctgccccctagccgcgacgagcttacgaaaaaccaggtgtcgctcacttgtttggtgaagggtttctatccgagcgatattgtggtagagtgggaatccaacgggcagccagagaacaattacaagacgacgccaccagtgctggattcggatgggagctttttcttgtactcaaagttgaccgtggataaaagccggtggcagcagggtaatgtgttttcatgctcggtaatgcacgaggccctccataaccattatacgcagaaaagcctttcgctctcacccgggaaa

SEQ ID NO: 553 - DNA, 1140 bp, Artificial Sequence
  source: /note="Description of Artificial Sequence: Synthetic polynucleotide"
gcccctacgtcctcctcaactaaaaagacgcaacttcagcttgagttgcttcttctcgaccttcagatgattttgaacggaatcaataattacaaaaatcctaaacttactaacatgctcacgtttaagttttatatgccaaaaaaggccactgagttgaaacaccttcaatgcttggaggaggaacttaaaccacttgaggaagccttgaatcttgctccgtccaaaaactttcatttgcggccacgagatctgataagcaacatcaacgtgatcgtcctggaactgaaaggaagcgaaacgacgtttatgtgcgaatatgcagacgaaactgcgacaatcgttgaatttctcaatcgatggatcacttttagccaatctatcatcagcacgttgactggtggtggaggatcgggaggtggaggatctggaggaggaggatcgggtggaggaggatccgataaaactcatacgtgcccaccctgccccgcaccggaggcagcaggtggtccttccgtattcttgtttccgccgaagccgaaggacacgcttatgattagcaggactcccgaagtgacgtgcgtcgtagtcgacgtgtcgcatgaggacccggaggtcaagttcaactggtatgtcgatggcgtagaagtacacaatgcaaagactaaaccccgcgaagaacagtacaattcgacatacagagtagtgagcgtcttgcaggtgctgcacgttgactggctcaacggaaaggagtataagtgtaaagtatcgaataaggcacttggtgcacctatcgagaaaacgatctccaaggctaagggtcagccaagagaaccccaagtctacactctgccccctagccgcgacgagcttacgaaaaaccaggtgtcgctcacttgtttggtgaagggtttctatccgagcgatattgtggtagagtgggaatccaacgggcagccagagaacaattacaagacgacgccaccagtgctggattcggatgggagctttttcttgtactcaaagttgaccgtggataaaagccggtggcagcagggtaatgtgttttcatgctcggtaatgcacgaggccctccataaccattatacgcagaaaagcctttcgctctcacccgggaaa

SEQ ID NO: 554 - DNA, 1140 bp, Artificial Sequence
  source: /note="Description of Artificial Sequence: Synthetic polynucleotide"
gcccctacgtcctcctcaactaaaaagacgcaacttcagcttgagcatcttcttctcgaccttcagatgattttgaacggaatcaataattacaaaaatcctaaacttactaacatgctcacgtttaagttttatatgccaaaaaaggccactgagttgaaacaccttcaatgcttggaggaggaacttaaaccacttgaggaagccttgaatcttgctccgtccaaaaactttcatttgcggccacgagtcctgataagcaacatcaacgtgatcgtcctggaactgaaaggaagcgaaacgacgtttatgtgcgaatatgcagacgaaactgcgacaatcgttgaatttctcaatcgatggatcacttttagccaatctatcatcagcacgttgactggtggtggaggatcgggaggtggaggatctggaggaggaggatcgggtggaggaggatccgataaaactcatacgtgcccaccctgccccgcaccggaggcagcaggtggtccttccgtattcttgtttccgccgaagccgaaggacacgcttatgattagcaggactcccgaagtgacgtgcgtcgtagtcgacgtgtcgcatgaggacccggaggtcaagttcaactggtatgtcgatggcgtagaagtacacaatgcaaagactaaaccccgcgaagaacagtacaattcgacatacagagtagtgagcgtcttgcaggtgctgcacgttgactggctcaacggaaaggagtataagtgtaaagtatcgaataaggcacttggtgcacctatcgagaaaacgatctccaaggctaagggtcagccaagagaaccccaagtctacactctgccccctagccgcgacgagcttacgaaaaaccaggtgtcgctcacttgtttggtgaagggtttctatccgagcgatattgtggtagagtgggaatccaacgggcagccagagaacaattacaagacgacgccaccagtgctggattcggatgggagctttttcttgtactcaaagttgaccgtggataaaagccggtggcagcagggtaatgtgttttcatgctcggtaatgcacgaggccctccataaccattatacgcagaaaagcctttcgctctcacccgggaaa

SEQ ID NO: 555 - DNA, 1140 bp, Artificial Sequence
  source: /note="Description of Artificial Sequence: Synthetic polynucleotide"
gcccctacgtcctcctcaactaaaaagacgcaacttcagcttgagcatcttcttctcgaccttcagatgattttgaacggaatcaataattacaaaaatcctaaacttactaacatgctcacgtttaagttttatatgccaaaaaaggccactgagttgaaacaccttcaatgcttggaggaggaacttaaaccacttgaggaagccttgaatcttgctccgtccaaaaactttcatttgcggccacgagatctgataagcaacatcaacgtgagcgtcctggaactgaaaggaagcgaaacgacgtttatgtgcgaatatgcagacgaaactgcgacaatcgttgaatttctcaatcgatggatcacttttagccaatctatcatcagcacgttgactggtggtggaggatcgggaggtggaggatctggaggaggaggatcgggtggaggaggatccgataaaactcatacgtgcccaccctgccccgcaccggaggcagcaggtggtccttccgtattcttgtttccgccgaagccgaaggacacgcttatgattagcaggactcccgaagtgacgtgcgtcgtagtcgacgtgtcgcatgaggacccggaggtcaagttcaactggtatgtcgatggcgtagaagtacacaatgcaaagactaaaccccgcgaagaacagtacaattcgacatacagagtagtgagcgtcttgcaggtgctgcacgttgactggctcaacggaaaggagtataagtgtaaagtatcgaataaggcacttggtgcacctatcgagaaaacgatctccaaggctaagggtcagccaagagaaccccaagtctacactctgccccctagccgcgacgagcttacgaaaaaccaggtgtcgctcacttgtttggtgaagggtttctatccgagcgatattgtggtagagtgggaatccaacgggcagccagagaacaattacaagacgacgccaccagtgctggattcggatgggagctttttcttgtactcaaagttgaccgtggataaaagccggtggcagcagggtaatgtgttttcatgctcggtaatgcacgaggccctccataaccattatacgcagaaaagcctttcgctctcacccgggaaa

SEQ ID NO: 556 - DNA, 1140 bp, Artificial Sequence
  source: /note="Description of Artificial Sequence: Synthetic polynucleotide"
gcccctacgtcctcctcaactaaaaagacgcaacttcagcttgagcatcttcttctcgaccttcagatgattttgaacggaatcaataattacaaaaatcctaaacttactgaaatgctcacgtttaagttttatatgccaaaaaaggccactgagttgaaacaccttcaatgcttggaggaggaacttaaaccacttgaggaagccttgaatcttgctccgtccaaaaactttcatttgcggccacgagatctgataagcaacatcaacgtgatcgtcctggaactgaaaggaagcgaaacgacgtttatgtgcgaatatgcagacgaaactgcgacaatcgttgaatttctcaatcgatggatcacttttagccaatctatcatcagcacgttgactggtggtggaggatcgggaggtggaggatctggaggaggaggatcgggtggaggaggatccgataaaactcatacgtgcccaccctgccccgcaccggaggcagcaggtggtccttccgtattcttgtttccgccgaagccgaaggacacgcttatgattagcaggactcccgaagtgacgtgcgtcgtagtcgacgtgtcgcatgaggacccggaggtcaagttcaactggtatgtcgatggcgtagaagtacacaatgcaaagactaaaccccgcgaagaacagtacaattcgacatacagagtagtgagcgtcttgcaggtgctgcacgttgactggctcaacggaaaggagtataagtgtaaagtatcgaataaggcacttggtgcacctatcgagaaaacgatctccaaggctaagggtcagccaagagaaccccaagtctacactctgccccctagccgcgacgagcttacgaaaaaccaggtgtcgctcacttgtttggtgaagggtttctatccgagcgatattgtggtagagtgggaatccaacgggcagccagagaacaattacaagacgacgccaccagtgctggattcggatgggagctttttcttgtactcaaagttgaccgtggataaaagccggtggcagcagggtaatgtgttttcatgctcggtaatgcacgaggccctccataaccattatacgcagaaaagcctttcgctctcacccgggaaa

SEQ ID NO: 557 - DNA, 1140 bp, Artificial Sequence
  source: /note="Description of Artificial Sequence: Synthetic polynucleotide"
gcccctacgtcctcctcaactaaaaagacgcaacttcagcttgagcatcttcttctcgaccttcagatgattttgaacggaatcaataattacaaaaatcctaaacttactagaatgctcacgaagaagttttatatgccaaaaaaggccactgagttgaaacaccttcaatgcttggaggaggaacttaaaccacttgaggaagccttgaatcttgctccgtccaaaaactttcatttgcggccacgagatctgataagcaacatcaacgtgatcgtcctggaactgaaaggaagcgaaacgacgtttatgtgcgaatatgcagacgaaactgcgacaatcgttgaatttctcaatcgatggatcacttttagccaatctatcatcagcacgttgactggtggtggaggatcgggaggtggaggatctggaggaggaggatcgggtggaggaggatccgataaaactcatacgtgcccaccctgccccgcaccggaggcagcaggtggtccttccgtattcttgtttccgccgaagccgaaggacacgcttatgattagcaggactcccgaagtgacgtgcgtcgtagtcgacgtgtcgcatgaggacccggaggtcaagttcaactggtatgtcgatggcgtagaagtacacaatgcaaagactaaaccccgcgaagaacagtacaattcgacatacagagtagtgagcgtcttgcaggtgctgcacgttgactggctcaacggaaaggagtataagtgtaaagtatcgaataaggcacttggtgcacctatcgagaaaacgatctccaaggctaagggtcagccaagagaaccccaagtctacactctgccccctagccgcgacgagcttacgaaaaaccaggtgtcgctcacttgtttggtgaagggtttctatccgagcgatattgtggtagagtgggaatccaacgggcagccagagaacaattacaagacgacgccaccagtgctggattcggatgggagctttttcttgtactcaaagttgaccgtggataaaagccggtggcagcagggtaatgtgttttcatgctcggtaatgcacgaggccctccataaccattatacgcagaaaagcctttcgctctcacccgggaaa

SEQ ID NO: 558 - DNA, 1140 bp, Artificial Sequence
  source: /note="Description of Artificial Sequence: Synthetic polynucleotide"
gcccctacgtcctcctcaactaaaaagacgcaacttcagcttgagcatcttcttctcgaccttcagatgattttgaacggaatcaataattacaaaaatcctaaacttactagaatgctcacgcagaagttttatatgccaaaaaaggccactgagttgaaacaccttcaatgcttggaggaggaacttaaaccacttgaggaagccttgaatcttgctccgtccaaaaactttcatttgcggccacgagatctgataagcaacatcaacgtgatcgtcctggaactgaaaggaagcgaaacgacgtttatgtgcgaatatgcagacgaaactgcgacaatcgttgaatttctcaatcgatggatcacttttagccaatctatcatcagcacgttgactggtggtggaggatcgggaggtggaggatctggaggaggaggatcgggtggaggaggatccgataaaactcatacgtgcccaccctgccccgcaccggaggcagcaggtggtccttccgtattcttgtttccgccgaagccgaaggacacgcttatgattagcaggactcccgaagtgacgtgcgtcgtagtcgacgtgtcgcatgaggacccggaggtcaagttcaactggtatgtcgatggcgtagaagtacacaatgcaaagactaaaccccgcgaagaacagtacaattcgacatacagagtagtgagcgtcttgcaggtgctgcacgttgactggctcaacggaaaggagtataagtgtaaagtatcgaataaggcacttggtgcacctatcgagaaaacgatctccaaggctaagggtcagccaagagaaccccaagtctacactctgccccctagccgcgacgagcttacgaaaaaccaggtgtcgctcacttgtttggtgaagggtttctatccgagcgatattgtggtagagtgggaatccaacgggcagccagagaacaattacaagacgacgccaccagtgctggattcggatgggagctttttcttgtactcaaagttgaccgtggataaaagccggtggcagcagggtaatgtgttttcatgctcggtaatgcacgaggccctccataaccattatacgcagaaaagcctttcgctctcacccgggaaa

SEQ ID NO: 559 - DNA, 1140 bp, Artificial Sequence
  source: /note="Description of Artificial Sequence: Synthetic polynucleotide"
gcccctacgtcctcctcaactaaaaagacgcaacttcagcttgagcatcttcttctcgaccttcagatgattttgaacggaatcaataattacaaaaatcctaaacttactagaatgctcacggcaaagtttgctatgccaaaaaaggccactgagttgaaacaccttcaatgcttggaggaggaacttaaaccacttgaggaagccttgaatggtgctccgtccaaaaactttcatttgcggccacgagatctgataagcgatatcaacgtgatcgtcctggaactgaaaggaagcgaaacgacgtttatgtgcgaatatgcagacgaaactgcgacaatcgttgaatttctcaatcgatggatcacttttagccaatctatcatcagcacgttgactggtggtggaggatcgggaggtggaggatctggaggaggaggatcgggtggaggaggatccgataaaactcatacgtgcccaccctgccccgcaccggaggcagcaggtggtccttccgtattcttgtttccgccgaagccgaaggacacgcttatgattagcaggactcccgaagtgacgtgcgtcgtagtcgacgtgtcgcatgaggacccggaggtcaagttcaactggtatgtcgatggcgtagaagtacacaatgcaaagactaaaccccgcgaagaacagtacaattcgacatacagagtagtgagcgtcttgcaggtgctgcacgttgactggctcaacggaaaggagtataagtgtaaagtatcgaataaggcacttggtgcacctatcgagaaaacgatctccaaggctaagggtcagccaagagaaccccaagtctacactctgccccctagccgcgacgagcttacgaaaaaccaggtgtcgctcacttgtttggtgaagggtttctatccgagcgatattgtggtagagtgggaatccaacgggcagccagagaacaattacaagacgacgccaccagtgctggattcggatgggagctttttcttgtactcaaagttgaccgtggataaaagccggtggcagcagggtaatgtgttttcatgctcggtaatgcacgaggccctccataaccattatacgcagaaaagcctttcgctctcacccgggaaa

SEQ ID NO: 560 - DNA, 1140 bp, Artificial Sequence
  source: /note="Description of Artificial Sequence: Synthetic polynucleotide"
gcccctacgtcctcctcaactaaaaagacgcaacttcagcttgagcatcttcttctcgaccttcagatgattttgaacggaatcaataattacaaaaatcctaaacttactaacatgctcacgtttaagttttatatgccaaaaaaggccactgagttgaaacaccttcaatgcttggaggaggaacttaaaccacttgaggaagccttgaatcttgctccgtccaaaaactttcatttgcggccacgagatctgataaggaacatcaacgtgatcgtcctggaactgaaaggaagcgaaacgacgtttatgtgcgaatatgcagacgaaactgcgacaatcgttgaatttctcaatcgatggatcacttttagccaatctatcatcagcacgttgactggtggtggaggatcgggaggtggaggatctggaggaggaggatcgggtggaggaggatccgataaaactcatacgtgcccaccctgccccgcaccggaggcagcaggtggtccttccgtattcttgtttccgccgaagccgaaggacacgcttatgattagcaggactcccgaagtgacgtgcgtcgtagtcgacgtgtcgcatgaggacccggaggtcaagttcaactggtatgtcgatggcgtagaagtacacaatgcaaagactaaaccccgcgaagaacagtacaattcgacatacagagtagtgagcgtcttgcaggtgctgcacgttgactggctcaacggaaaggagtataagtgtaaagtatcgaataaggcacttggtgcacctatcgagaaaacgatctccaaggctaagggtcagccaagagaaccccaagtctacactctgccccctagccgcgacgagcttacgaaaaaccaggtgtcgctcacttgtttggtgaagggtttctatccgagcgatattgtggtagagtgggaatccaacgggcagccagagaacaattacaagacgacgccaccagtgctggattcggatgggagctttttcttgtactcaaagttgaccgtggataaaagccggtggcagcagggtaatgtgttttcatgctcggtaatgcacgaggccctccataaccattatacgcagaaaagcctttcgctctcacccgggaaa

SEQ ID NO: 561 - DNA, 1140 bp, Artificial Sequence
  source: /note="Description of Artificial Sequence: Synthetic polynucleotide"
gcccctacgtcctcctcaactaaaaagacgcaacttcagcttgagaaccttcttctcgaccttcagatgattttgaacggaatcaataattacaaaaatcctaaacttactgaaatgctcacgtttaagttttatatgccaaaaaaggccactgagttgaaacaccttcaatgcttggaggaggaacttaaaccacttgaggaagccttgaatcttgctccgtccaaaaactttcatttgcggccacgagatctgataagcaacatcaacgtgatcgtcctggaactgaaaggaagcgaaacgacgtttatgtgcgaatatgcagacgaaactgcgacaatcgttgaatttctcaatcgatggatcacttttagccaatctatcatcagcacgttgactggtggtggaggatcgggaggtggaggatctggaggaggaggatcgggtggaggaggatccgataaaactcatacgtgcccaccctgccccgcaccggaggcagcaggtggtccttccgtattcttgtttccgccgaagccgaaggacacgcttatgattagcaggactcccgaagtgacgtgcgtcgtagtcgacgtgtcgcatgaggacccggaggtcaagttcaactggtatgtcgatggcgtagaagtacacaatgcaaagactaaaccccgcgaagaacagtacaattcgacatacagagtagtgagcgtcttgcaggtgctgcacgttgactggctcaacggaaaggagtataagtgtaaagtatcgaataaggcacttggtgcacctatcgagaaaacgatctccaaggctaagggtcagccaagagaaccccaagtctacactctgccccctagccgcgacgagcttacgaaaaaccaggtgtcgctcacttgtttggtgaagggtttctatccgagcgatattgtggtagagtgggaatccaacgggcagccagagaacaattacaagacgacgccaccagtgctggattcggatgggagctttttcttgtactcaaagttgaccgtggataaaagccggtggcagcagggtaatgtgttttcatgctcggtaatgcacgaggccctccataaccattatacgcagaaaagcctttcgctctcacccgggaaa

SEQ ID NO: 562 - DNA, 1140 bp, Artificial Sequence
  source: /note="Description of Artificial Sequence: Synthetic polynucleotide"
gcccctacgtcctcctcaactaaaaagacgcaacttcagcttgagcatcttcttctcgaccttcagatgattttgaacggaatcaataattacaaaaatcctaaacttactgaaatgctcacgtttaagttttatatgccaaaaaaggccactgagttgaaacaccttcaatgcttggaggaggaacttaaaccacttgaggaagccttgaatcttgctccgtccaaaaactttcatttgcggccacgagtcctgataagcaacatcaacgtgatcgtcctggaactgaaaggaagcgaaacgacgtttatgtgcgaatatgcagacgaaactgcgacaatcgttgaatttctcaatcgatggatcacttttagccaatctatcatcagcacgttgactggtggtggaggatcgggaggtggaggatctggaggaggaggatcgggtggaggaggatccgataaaactcatacgtgcccaccctgccccgcaccggaggcagcaggtggtccttccgtattcttgtttccgccgaagccgaaggacacgcttatgattagcaggactcccgaagtgacgtgcgtcgtagtcgacgtgtcgcatgaggacccggaggtcaagttcaactggtatgtcgatggcgtagaagtacacaatgcaaagactaaaccccgcgaagaacagtacaattcgacatacagagtagtgagcgtcttgcaggtgctgcacgttgactggctcaacggaaaggagtataagtgtaaagtatcgaataaggcacttggtgcacctatcgagaaaacgatctccaaggctaagggtcagccaagagaaccccaagtctacactctgccccctagccgcgacgagcttacgaaaaaccaggtgtcgctcacttgtttggtgaagggtttctatccgagcgatattgtggtagagtgggaatccaacgggcagccagagaacaattacaagacgacgccaccagtgctggattcggatgggagctttttcttgtactcaaagttgaccgtggataaaagccggtggcagcagggtaatgtgttttcatgctcggtaatgcacgaggccctccataaccattatacgcagaaaagcctttcgctctcacccgggaaa

SEQ ID NO: 563 - DNA, 1140 bp, Artificial Sequence
  source: /note="Description of Artificial Sequence: Synthetic polynucleotide"
gcccctacgtcctcctcaactaaaaagacgcaacttcagcttgagcatcttcttctcgaccttcagatgattttgaacggaatcaataattacaaaaatcctaaacttactgaaatgctcacgtttaagttttatatgccaaaaaaggccactgagttgaaacaccttcaatgcttggaggaggaacttaaaccacttgaggaagccttgaatcttgctccgtccaaaaactttcatttgcggccacgagatctgataaggaacatcaacgtgatcgtcctggaactgaaaggaagcgaaacgacgtttatgtgcgaatatgcagacgaaactgcgacaatcgttgaatttctcaatcgatggatcacttttagccaatctatcatcagcacgttgactggtggtggaggatcgggaggtggaggatctggaggaggaggatcgggtggaggaggatccgataaaactcatacgtgcccaccctgccccgcaccggaggcagcaggtggtccttccgtattcttgtttccgccgaagccgaaggacacgcttatgattagcaggactcccgaagtgacgtgcgtcgtagtcgacgtgtcgcatgaggacccggaggtcaagttcaactggtatgtcgatggcgtagaagtacacaatgcaaagactaaaccccgcgaagaacagtacaattcgacatacagagtagtgagcgtcttgcaggtgctgcacgttgactggctcaacggaaaggagtataagtgtaaagtatcgaataaggcacttggtgcacctatcgagaaaacgatctccaaggctaagggtcagccaagagaaccccaagtctacactctgccccctagccgcgacgagcttacgaaaaaccaggtgtcgctcacttgtttggtgaagggtttctatccgagcgatattgtggtagagtgggaatccaacgggcagccagagaacaattacaagacgacgccaccagtgctggattcggatgggagctttttcttgtactcaaagttgaccgtggataaaagccggtggcagcagggtaatgtgttttcatgctcggtaatgcacgaggccctccataaccattatacgcagaaaagcctttcgctctcacccgggaaa

SEQ ID NO: 564 - DNA, 1140 bp, Artificial Sequence
  source: /note="Description of Artificial Sequence: Synthetic polynucleotide"
gcccctacgtcctcctcaactaaaaagacgcaacttcagcttgagcatcttcttctcgaccttcagatgattttgaacggaatcaataattacaaaaatcctaaacttactgaaatgctcacgtttaagttttatatgccaaaaaaggccactgagttgaaacaccttcaatgcttggaggaggaacttaaaccacttgaggaagccttgaatcttgctccgtccaaaaactttcatttgcggccacgagatctgataagcaacatcaacgtgagcgtcctggaactgaaaggaagcgaaacgacgtttatgtgcgaatatgcagacgaaactgcgacaatcgttgaatttctcaatcgatggatcacttttagccaatctatcatcagcacgttgactggtggtggaggatcgggaggtggaggatctggaggaggaggatcgggtggaggaggatccgataaaactcatacgtgcccaccctgccccgcaccggaggcagcaggtggtccttccgtattcttgtttccgccgaagccgaaggacacgcttatgattagcaggactcccgaagtgacgtgcgtcgtagtcgacgtgtcgcatgaggacccggaggtcaagttcaactggtatgtcgatggcgtagaagtacacaatgcaaagactaaaccccgcgaagaacagtacaattcgacatacagagtagtgagcgtcttgcaggtgctgcacgttgactggctcaacggaaaggagtataagtgtaaagtatcgaataaggcacttggtgcacctatcgagaaaacgatctccaaggctaagggtcagccaagagaaccccaagtctacactctgccccctagccgcgacgagcttacgaaaaaccaggtgtcgctcacttgtttggtgaagggtttctatccgagcgatattgtggtagagtgggaatccaacgggcagccagagaacaattacaagacgacgccaccagtgctggattcggatgggagctttttcttgtactcaaagttgaccgtggataaaagccggtggcagcagggtaatgtgttttcatgctcggtaatgcacgaggccctccataaccattatacgcagaaaagcctttcgctctcacccgggaaa

SEQ ID NO: 565 - DNA, 1140 bp, Artificial Sequence
  source: /note="Description of Artificial Sequence: Synthetic polynucleotide"
gcccctacgtcctcctcaactaaaaagacgcaacttcagcttgagaaccttcttctcgaccttcagatgattttgaacggaatcaataattacaaaaatcctaaacttactagaatgctcacgcagaagttttatatgccaaaaaaggccactgagttgaaacaccttcaatgcttggaggaggaacttaaaccacttgaggaagccttgaatcttgctccgtccaaaaactttcatttgcggccacgagatctgataagcaacatcaacgtgatcgtcctggaactgaaaggaagcgaaacgacgtttatgtgcgaatatgcagacgaaactgcgacaatcgttgaatttctcaatcgatggatcacttttagccaatctatcatcagcacgttgactggtggtggaggatcgggaggtggaggatctggaggaggaggatcgggtggaggaggatccgataaaactcatacgtgcccaccctgccccgcaccggaggcagcaggtggtccttccgtattcttgtttccgccgaagccgaaggacacgcttatgattagcaggactcccgaagtgacgtgcgtcgtagtcgacgtgtcgcatgaggacccggaggtcaagttcaactggtatgtcgatggcgtagaagtacacaatgcaaagactaaaccccgcgaagaacagtacaattcgacatacagagtagtgagcgtcttgcaggtgctgcacgttgactggctcaacggaaaggagtataagtgtaaagtatcgaataaggcacttggtgcacctatcgagaaaacgatctccaaggctaagggtcagccaagagaaccccaagtctacactctgccccctagccgcgacgagcttacgaaaaaccaggtgtcgctcacttgtttggtgaagggtttctatccgagcgatattgtggtagagtgggaatccaacgggcagccagagaacaattacaagacgacgccaccagtgctggattcggatgggagctttttcttgtactcaaagttgaccgtggataaaagccggtggcagcagggtaatgtgttttcatgctcggtaatgcacgaggccctccataaccattatacgcagaaaagcctttcgctctcacccgggaaa

SEQ ID NO: 566 - DNA, 1140 bp, Artificial Sequence
  source: /note="Description of Artificial Sequence: Synthetic polynucleotide"
gcccctacgtcctcctcaactaaaaagacgcaacttcagcttgagcatcttcttctcgaccttcagatgattttgaacggaatcaataattacaaaaatcctaaacttactagaatgctcacgcagaagttttatatgccaaaaaaggccactgagttgaaacaccttcaatgcttggaggaggaacttaaaccacttgaggaagccttgaatcttgctccgtccaaaaactttcatttgcggccacgagatctgataagcaacatcaacgtgagcgtcctggaactgaaaggaagcgaaacgacgtttatgtgcgaatatgcagacgaaactgcgacaatcgttgaatttctcaatcgatggatcacttttagccaatctatcatcagcacgttgactggtggtggaggatcgggaggtggaggatctggaggaggaggatcgggtggaggaggatccgataaaactcatacgtgcccaccctgccccgcaccggaggcagcaggtggtccttccgtattcttgtttccgccgaagccgaaggacacgcttatgattagcaggactcccgaagtgacgtgcgtcgtagtcgacgtgtcgcatgaggacccggaggtcaagttcaactggtatgtcgatggcgtagaagtacacaatgcaaagactaaaccccgcgaagaacagtacaattcgacatacagagtagtgagcgtcttgcaggtgctgcacgttgactggctcaacggaaaggagtataagtgtaaagtatcgaataaggcacttggtgcacctatcgagaaaacgatctccaaggctaagggtcagccaagagaaccccaagtctacactctgccccctagccgcgacgagcttacgaaaaaccaggtgtcgctcacttgtttggtgaagggtttctatccgagcgatattgtggtagagtgggaatccaacgggcagccagagaacaattacaagacgacgccaccagtgctggattcggatgggagctttttcttgtactcaaagttgaccgtggataaaagccggtggcagcagggtaatgtgttttcatgctcggtaatgcacgaggccctccataaccattatacgcagaaaagcctttcgctctcacccgggaaa

SEQ ID NO: 567 - DNA, 1140 bp, Artificial Sequence
  source: /note="Description of Artificial Sequence: Synthetic polynucleotide"
gcccctacgtcctcctcaactaaaaagacgcaacttcagcttgagaaccttcttctcgaccttcagatgattttgaacggaatcaataattacaaaaatcctgaacttactaacatgctcacgtttaagttttatatgccaaaaaaggccactgagttgaaacaccttcaatgcttggaggaggaacttaaaccacttgaggaagccttgaatcttgctccgtccaaaaactttcatttgcggccacgagatctgataagcaacatcaacgtgatcgtcctggaactgaaaggaagcgaaacgacgtttatgtgcgaatatgcagacgaaactgcgacaatcgttgaatttctcaatcgatggatcacttttagccaatctatcatcagcacgttgactggtggtggaggatcgggaggtggaggatctggaggaggaggatcgggtggaggaggatccgataaaactcatacgtgcccaccctgccccgcaccggaggcagcaggtggtccttccgtattcttgtttccgccgaagccgaaggacacgcttatgattagcaggactcccgaagtgacgtgcgtcgtagtcgacgtgtcgcatgaggacccggaggtcaagttcaactggtatgtcgatggcgtagaagtacacaatgcaaagactaaaccccgcgaagaacagtacaattcgacatacagagtagtgagcgtcttgcaggtgctgcacgttgactggctcaacggaaaggagtataagtgtaaagtatcgaataaggcacttggtgcacctatcgagaaaacgatctccaaggctaagggtcagccaagagaaccccaagtctacactctgccccctagccgcgacgagcttacgaaaaaccaggtgtcgctcacttgtttggtgaagggtttctatccgagcgatattgtggtagagtgggaatccaacgggcagccagagaacaattacaagacgacgccaccagtgctggattcggatgggagctttttcttgtactcaaagttgaccgtggataaaagccggtggcagcagggtaatgtgttttcatgctcggtaatgcacgaggccctccataaccattatacgcagaaaagcctttcgctctcacccgggaaa

SEQ ID NO: 568 - DNA, 1146 bp, Artificial Sequence
  source: /note="Description of Artificial Sequence: Synthetic polynucleotide"
gcccctacgtcctcctcaactaaaaagacgcaacttcagcttgagcatcttcttctcgaccttcagatgattttgaacggaatcaataattacaaaaatcctaaacttactagaatgctcacgtttaagttttatatgccaaaaaaggccactgagttgaaacaccttcaatgcttggaggaggaacttaaaccacttgaggaagtattgaatcttgctcagtccaaaaactttcatttgcggccacgagatctgataagcaacatcaacgtgatcgtcctggaactgaaaggaagcgaaacgacgtttatgtgcgaatatgcagacgaaactgcgacaatcgttgaatttctcaatcgatggatcacttttagccaatctatcatcagcacgttgactggtggtggaggatcgggaggtggaggatctggaggaggaggatcgggtggaggaggatccgaaagtaagtatggccctccttgccctccgtgccctgcacctgagttcctcggcggtccttcagtgtttttgtttccacccaaacctaaagacacccttatgatctctcgaacacctgaagtaacctgtgtagttgttgatgtctcacaggaagatccggaggttcaatttaattggtacgtcgatggtgttgaagtgcataatgcgaagactaagccgagagaggaacagttcaattccacttatcgcgtggtttcagtccttacagtcttgcaccaagattggcttaacggaaaggaatataagtgcaaggtaagtaataaagggcttccatcaagcattgaaaaaaccataagtaaagcaaaaggacaaccgagggagccccaagtctacacgcttcctccttctcaggaggagatgaccaaaaaccaggtaagtttgacgtgtttggtaaaggggttttatccctcagatattgctgtcgaatgggagtctaatggtcagcctgagaacaattacaagactacgccacccgttctggattcagacggatctttcttcctctacagcagattgacggtagacaaaagccgctggcaagagggcaatgtcttcagttgttctgtaatgcacgaagccctccataatcactacacgcagaaatctctgagcttgtctcttgggaaa

SEQ ID NO: 569 - DNA, 1146 bp, Artificial Sequence
  source: /note="Description of Artificial Sequence: Synthetic polynucleotide"
gcccctacgtcctcctcaactaaaaagacgcaacttcagcttgagcatcttcttctcgaccttcagatgattttgaacggaatcaataattacaaaaatcctaaacttactagaatgctcacgtttaagttttatatgccaaaaaaggccactgagttgaaacaccttcaatgcttggaggaggaacttaaaccacttgaggaagccttgaatcttgctccgtccaaaaactttcatttgcggccacgagatctgataagcaacatcaacgtgatcgtcctggaactgaaaggaagcgaaacgacgtttatgtgcgaatatgcagacgaaactgcgacaatcgttgaatttctcaatcgatggatcacttttagccaatctatcatcagcacgttgactggtggtggaggatcgggaggtggaggatctggaggaggaggatcgggtggaggaggatccgaaagtaagtatggccctccttgccctccgtgccctgcacctgagttcctcggcggtccttcagtgtttttgtttccacccaaacctaaagacacccttatgatctctcgaacacctgaagtaacctgtgtagttgttgatgtctcacaggaagatccggaggttcaatttaattggtacgtcgatggtgttgaagtgcataatgcgaagactaagccgagagaggaacagttcaattccacttatcgcgtggtttcagtccttacagtcttgcaccaagattggcttaacggaaaggaatataagtgcaaggtaagtaataaagggcttccatcaagcattgaaaaaaccataagtaaagcaaaaggacaaccgagggagccccaagtctacacgcttcctccttctcaggaggagatgaccaaaaaccaggtaagtttgacgtgtttggtaaaggggttttatccctcagatattgctgtcgaatgggagtctaatggtcagcctgagaacaattacaagactacgccacccgttctggattcagacggatctttcttcctctacagcagattgacggtagacaaaagccgctggcaagagggcaatgtcttcagttgttctgtaatgcacgaagccctccataatcactacacgcagaaatctctgagcttgtctcttgggaaa

SEQ ID NO: 570 - DNA, 1146 bp, Artificial Sequence
  source: /note="Description of Artificial Sequence: Synthetic polynucleotide"
gcccctacgtcctcctcaactaaaaagacgcaacttcagcttgaggatcttcttctcgaccttcagatgattttgaacggaatcaataattacaaaaatcctaaacttactagaatgctcacgtttaagttttatatgccaaaaaaggccactgagttgaaacaccttcaatgcttggaggaggaacttaaaccacttgaggaagccttgaatcttgctccgtccaaaaactttcatttgcggccacgagatctgataagcaacatcaacgtgatcgtcctggaactgaaaggaagcgaaacgacgtttatgtgcgaatatgcagacgaaactgcgacaatcgttgaatttctcaatcgatggatcacttttagccaatctatcatcagcacgttgactggtggtggaggatcgggaggtggaggatctggaggaggaggatcgggtggaggaggatccgaaagtaagtatggccctccttgccctccgtgccctgcacctgagttcctcggcggtccttcagtgtttttgtttccacccaaacctaaagacacccttatgatctctcgaacacctgaagtaacctgtgtagttgttgatgtctcacaggaagatccggaggttcaatttaattggtacgtcgatggtgttgaagtgcataatgcgaagactaagccgagagaggaacagttcaattccacttatcgcgtggtttcagtccttacagtcttgcaccaagattggcttaacggaaaggaatataagtgcaaggtaagtaataaagggcttccatcaagcattgaaaaaaccataagtaaagcaaaaggacaaccgagggagccccaagtctacacgcttcctccttctcaggaggagatgaccaaaaaccaggtaagtttgacgtgtttggtaaaggggttttatccctcagatattgctgtcgaatgggagtctaatggtcagcctgagaacaattacaagactacgccacccgttctggattcagacggatctttcttcctctacagcagattgacggtagacaaaagccgctggcaagagggcaatgtcttcagttgttctgtaatgcacgaagccctccataatcactacacgcagaaatctctgagcttgtctcttgggaaa

SEQ ID NO: 571 - DNA, 1146 bp, Artificial Sequence
  source: /note="Description of Artificial Sequence: Synthetic polynucleotide"
gcccctacgtcctcctcaactaaaaagacgcaacttcagcttgagaatcttcttctcgaccttcagatgattttgaacggaatcaataattacaaaaatcctaaacttactagaatgctcacgtttaagttttatatgccaaaaaaggccactgagttgaaacaccttcaatgcttggaggaggaacttaaaccacttgaggaagccttgaatcttgctccgtccaaaaactttcatttgcggccacgagatctgataagcaacatcaacgtgatcgtcctggaactgaaaggaagcgaaacgacgtttatgtgcgaatatgcagacgaaactgcgacaatcgttgaatttctcaatcgatggatcacttttagccaatctatcatcagcacgttgactggtggtggaggatcgggaggtggaggatctggaggaggaggatcgggtggaggaggatccgaaagtaagtatggccctccttgccctccgtgccctgcacctgagttcctcggcggtccttcagtgtttttgtttccacccaaacctaaagacacccttatgatctctcgaacacctgaagtaacctgtgtagttgttgatgtctcacaggaagatccggaggttcaatttaattggtacgtcgatggtgttgaagtgcataatgcgaagactaagccgagagaggaacagttcaattccacttatcgcgtggtttcagtccttacagtcttgcaccaagattggcttaacggaaaggaatataagtgcaaggtaagtaataaagggcttccatcaagcattgaaaaaaccataagtaaagcaaaaggacaaccgagggagccccaagtctacacgcttcctccttctcaggaggagatgaccaaaaaccaggtaagtttgacgtgtttggtaaaggggttttatccctcagatattgctgtcgaatgggagtctaatggtcagcctgagaacaattacaagactacgccacccgttctggattcagacggatctttcttcctctacagcagattgacggtagacaaaagccgctggcaagagggcaatgtcttcagttgttctgtaatgcacgaagccctccataatcactacacgcagaaatctctgagcttgtctcttgggaaa

SEQ ID NO: 572 - DNA, 1146 bp, Artificial Sequence
  source: /note="Description of Artificial Sequence: Synthetic polynucleotide"
gcccctacgtcctcctcaactaaaaagacgcaacttcagcttgagctgcttcttctcgaccttcagatgattttgaacggaatcaataattacaaaaatcctaaacttactagaatgctcacgtttaagttttatatgccaaaaaaggccactgagttgaaacaccttcaatgcttggaggaggaacttaaaccacttgaggaagccttgaatcttgctccgtccaaaaactttcatttgcggccacgagatctgataagcaacatcaacgtgatcgtcctggaactgaaaggaagcgaaacgacgtttatgtgcgaatatgcagacgaaactgcgacaatcgttgaatttctcaatcgatggatcacttttagccaatctatcatcagcacgttgactggtggtggaggatcgggaggtggaggatctggaggaggaggatcgggtggaggaggatccgaaagtaagtatggccctccttgccctccgtgccctgcacctgagttcctcggcggtccttcagtgtttttgtttccacccaaacctaaagacacccttatgatctctcgaacacctgaagtaacctgtgtagttgttgatgtctcacaggaagatccggaggttcaatttaattggtacgtcgatggtgttgaagtgcataatgcgaagactaagccgagagaggaacagttcaattccacttatcgcgtggtttcagtccttacagtcttgcaccaagattggcttaacggaaaggaatataagtgcaaggtaagtaataaagggcttccatcaagcattgaaaaaaccataagtaaagcaaaaggacaaccgagggagccccaagtctacacgcttcctccttctcaggaggagatgaccaaaaaccaggtaagtttgacgtgtttggtaaaggggttttatccctcagatattgctgtcgaatgggagtctaatggtcagcctgagaacaattacaagactacgccacccgttctggattcagacggatctttcttcctctacagcagattgacggtagacaaaagccgctggcaagagggcaatgtcttcagttgttctgtaatgcacgaagccctccataatcactacacgcagaaatctctgagcttgtctcttgggaaa

SEQ ID NO: 573 - DNA, 1146 bp, Artificial Sequence
  source: /note="Description of Artificial Sequence: Synthetic polynucleotide"
gcccctacgtcctcctcaactaaaaagacgcaacttcagcttgagcatcttcttctcgaccttcagatgattttgaacggaaccaataattacaaaaatcctaaacttactagaatgctcacgtttaagttttatatgccaaaaaaggccactgagttgaaacaccttcaatgcttggaggaggaacttaaaccacttgaggaagccttgaatcttgctccgtccaaaaactttcatttgcggccacgagatctgataagcaacatcaacgtgatcgtcctggaactgaaaggaagcgaaacgacgtttatgtgcgaatatgcagacgaaactgcgacaatcgttgaatttctcaatcgatggatcacttttagccaatctatcatcagcacgttgactggtggtggaggatcgggaggtggaggatctggaggaggaggatcgggtggaggaggatccgaaagtaagtatggccctccttgccctccgtgccctgcacctgagttcctcggcggtccttcagtgtttttgtttccacccaaacctaaagacacccttatgatctctcgaacacctgaagtaacctgtgtagttgttgatgtctcacaggaagatccggaggttcaatttaattggtacgtcgatggtgttgaagtgcataatgcgaagactaagccgagagaggaacagttcaattccacttatcgcgtggtttcagtccttacagtcttgcaccaagattggcttaacggaaaggaatataagtgcaaggtaagtaataaagggcttccatcaagcattgaaaaaaccataagtaaagcaaaaggacaaccgagggagccccaagtctacacgcttcctccttctcaggaggagatgaccaaaaaccaggtaagtttgacgtgtttggtaaaggggttttatccctcagatattgctgtcgaatgggagtctaatggtcagcctgagaacaattacaagactacgccacccgttctggattcagacggatctttcttcctctacagcagattgacggtagacaaaagccgctggcaagagggcaatgtcttcagttgttctgtaatgcacgaagccctccataatcactacacgcagaaatctctgagcttgtctcttgggaaa

SEQ ID NO: 574 - DNA, 1146 bp, Artificial Sequence
  source: /note="Description of Artificial Sequence: Synthetic polynucleotide"
gcccctacgtcctcctcaactaaaaagacgcaacttcagcttgagcatcttcttctcgaccttcagatgattttgaacggaatcaataattacaaaaatcctaaacttactagaatgctcacgtttaagttttatatgccaaaaaaggccactgagttgaaacaccttcaatgcttggaggaggaacttaaaccacttgaggaagccttgaatcttgctccgtccaaaaactttcatttgcggccacgagttctgataagcaacatcaacgtgatcgtcctggaactgaaaggaagcgaaacgacgtttatgtgcgaatatgcagacgaaactgcgacaatcgttgaatttctcaatcgatggatcacttttagccaatctatcatcagcacgttgactggtggtggaggatcgggaggtggaggatctggaggaggaggatcgggtggaggaggatccgaaagtaagtatggccctccttgccctccgtgccctgcacctgagttcctcggcggtccttcagtgtttttgtttccacccaaacctaaagacacccttatgatctctcgaacacctgaagtaacctgtgtagttgttgatgtctcacaggaagatccggaggttcaatttaattggtacgtcgatggtgttgaagtgcataatgcgaagactaagccgagagaggaacagttcaattccacttatcgcgtggtttcagtccttacagtcttgcaccaagattggcttaacggaaaggaatataagtgcaaggtaagtaataaagggcttccatcaagcattgaaaaaaccataagtaaagcaaaaggacaaccgagggagccccaagtctacacgcttcctccttctcaggaggagatgaccaaaaaccaggtaagtttgacgtgtttggtaaaggggttttatccctcagatattgctgtcgaatgggagtctaatggtcagcctgagaacaattacaagactacgccacccgttctggattcagacggatctttcttcctctacagcagattgacggtagacaaaagccgctggcaagagggcaatgtcttcagttgttctgtaatgcacgaagccctccataatcactacacgcagaaatctctgagcttgtctcttgggaaa

SEQ ID NO: 575 - DNA, 1146 bp, Artificial Sequence
  source: /note="Description of Artificial Sequence: Synthetic polynucleotide"
gcccctacgtcctcctcaactaaaaagacgcaacttcagcttgagcatcttcttctcgaccttcagatgattttgaacggaatcaataattacaaaaatcctaaacttactagaatgctcacgtttaagttttatatgccaaaaaaggccactgagttgaaacaccttcaatgcttggaggaggaacttaaaccacttgaggaagccttgaatcttgctccgtccaaaaactttcatttgcggccacgagatctgatacgtaacatcaacgtgatcgtcctggaactgaaaggaagcgaaacgacgtttatgtgcgaatatgcagacgaaactgcgacaatcgttgaatttctcaatcgatggatcacttttagccaatctatcatcagcacgttgactggtggtggaggatcgggaggtggaggatctggaggaggaggatcgggtggaggaggatccgaaagtaagtatggccctccttgccctccgtgccctgcacctgagttcctcggcggtccttcagtgtttttgtttccacccaaacctaaagacacccttatgatctctcgaacacctgaagtaacctgtgtagttgttgatgtctcacaggaagatccggaggttcaatttaattggtacgtcgatggtgttgaagtgcataatgcgaagactaagccgagagaggaacagttcaattccacttatcgcgtggtttcagtccttacagtcttgcaccaagattggcttaacggaaaggaatataagtgcaaggtaagtaataaagggcttccatcaagcattgaaaaaaccataagtaaagcaaaaggacaaccgagggagccccaagtctacacgcttcctccttctcaggaggagatgaccaaaaaccaggtaagtttgacgtgtttggtaaaggggttttatccctcagatattgctgtcgaatgggagtctaatggtcagcctgagaacaattacaagactacgccacccgttctggattcagacggatctttcttcctctacagcagattgacggtagacaaaagccgctggcaagagggcaatgtcttcagttgttctgtaatgcacgaagccctccataatcactacacgcagaaatctctgagcttgtctcttgggaaa

SEQ ID NO: 576 - DNA, 1146 bp, Artificial Sequence
  source: /note="Description of Artificial Sequence: Synthetic polynucleotide"
gcccctacgtcctcctcaactaaaaagacgcaacttcagcttgagcatcttcttctcgaccttcagatgattttgaacggaatcaataattacaaaaatcctaaacttactagaatgctcacgtttaagttttatatgccaaaaaaggccactgagttgaaacaccttcaatgcttggaggaggaacttaaaccacttgaggaagccttgaatcttgctccgtccaaaaactttcatttgcggccacgagatctgataagcctgatcaacgtgatcgtcctggaactgaaaggaagcgaaacgacgtttatgtgcgaatatgcagacgaaactgcgacaatcgttgaatttctcaatcgatggatcacttttagccaatctatcatcagcacgttgactggtggtggaggatcgggaggtggaggatctggaggaggaggatcgggtggaggaggatccgaaagtaagtatggccctccttgccctccgtgccctgcacctgagttcctcggcggtccttcagtgtttttgtttccacccaaacctaaagacacccttatgatctctcgaacacctgaagtaacctgtgtagttgttgatgtctcacaggaagatccggaggttcaatttaattggtacgtcgatggtgttgaagtgcataatgcgaagactaagccgagagaggaacagttcaattccacttatcgcgtggtttcagtccttacagtcttgcaccaagattggcttaacggaaaggaatataagtgcaaggtaagtaataaagggcttccatcaagcattgaaaaaaccataagtaaagcaaaaggacaaccgagggagccccaagtctacacgcttcctccttctcaggaggagatgaccaaaaaccaggtaagtttgacgtgtttggtaaaggggttttatccctcagatattgctgtcgaatgggagtctaatggtcagcctgagaacaattacaagactacgccacccgttctggattcagacggatctttcttcctctacagcagattgacggtagacaaaagccgctggcaagagggcaatgtcttcagttgttctgtaatgcacgaagccctccataatcactacacgcagaaatctctgagcttgtctcttgggaaa

SEQ ID NO: 577 - DNA, 1146 bp, Artificial Sequence
  source: /note="Description of Artificial Sequence: Synthetic polynucleotide"
gcccctacgtcctcctcaactaaaaagacgcaacttcagcttgagcatcttcttctcgaccttcagatgattttgaacggaatcaataattacaaaaatcctaaacttactagaatgctcacgtttaagttttatatgccaaaaaaggccactgagttgaaacaccttcaatgcttggaggaggaacttaaaccacttgaggaagccttgaatcttgctccgtccaaaaactttcatttgcggccacgagatctgataagcagcatcaacgtgatcgtcctggaactgaaaggaagcgaaacgacgtttatgtgcgaatatgcagacgaaactgcgacaatcgttgaatttctcaatcgatggatcacttttagccaatctatcatcagcacgttgactggtggtggaggatcgggaggtggaggatctggaggaggaggatcgggtggaggaggatccgaaagtaagtatggccctccttgccctccgtgccctgcacctgagttcctcggcggtccttcagtgtttttgtttccacccaaacctaaagacacccttatgatctctcgaacacctgaagtaacctgtgtagttgttgatgtctcacaggaagatccggaggttcaatttaattggtacgtcgatggtgttgaagtgcataatgcgaagactaagccgagagaggaacagttcaattccacttatcgcgtggtttcagtccttacagtcttgcaccaagattggcttaacggaaaggaatataagtgcaaggtaagtaataaagggcttccatcaagcattgaaaaaaccataagtaaagcaaaaggacaaccgagggagccccaagtctacacgcttcctccttctcaggaggagatgaccaaaaaccaggtaagtttgacgtgtttggtaaaggggttttatccctcagatattgctgtcgaatgggagtctaatggtcagcctgagaacaattacaagactacgccacccgttctggattcagacggatctttcttcctctacagcagattgacggtagacaaaagccgctggcaagagggcaatgtcttcagttgttctgtaatgcacgaagccctccataatcactacacgcagaaatctctgagcttgtctcttgggaaa

SEQ ID NO: 578 - DNA, 1146 bp, Artificial Sequence
  source: /note="Description of Artificial Sequence: Synthetic polynucleotide"
gcccctacgtcctcctcaactaaaaagacgcaacttcagcttgagcatcttcttctcgaccttcagatgattttgaacggaatcaataattacaaaaatcctaaacttactagaatgctcacgtttaagttttatatgccaaaaaaggccactgagttgaaacaccttcaatgcttggaggaggaacttaaaccacttgaggaagccttgaatcttgctccgtccaaaaactttcatttgcggccacgagatctgataagcaacatcaacgtgagcgtcctggaactgaaaggaagcgaaacgacgtttatgtgcgaatatgcagacgaaactgcgacaatcgttgaatttctcaatcgatggatcacttttagccaatctatcatcagcacgttgactggtggtggaggatcgggaggtggaggatctggaggaggaggatcgggtggaggaggatccgaaagtaagtatggccctccttgccctccgtgccctgcacctgagttcctcggcggtccttcagtgtttttgtttccacccaaacctaaagacacccttatgatctctcgaacacctgaagtaacctgtgtagttgttgatgtctcacaggaagatccggaggttcaatttaattggtacgtcgatggtgttgaagtgcataatgcgaagactaagccgagagaggaacagttcaattccacttatcgcgtggtttcagtccttacagtcttgcaccaagattggcttaacggaaaggaatataagtgcaaggtaagtaataaagggcttccatcaagcattgaaaaaaccataagtaaagcaaaaggacaaccgagggagccccaagtctacacgcttcctccttctcaggaggagatgaccaaaaaccaggtaagtttgacgtgtttggtaaaggggttttatccctcagatattgctgtcgaatgggagtctaatggtcagcctgagaacaattacaagactacgccacccgttctggattcagacggatctttcttcctctacagcagattgacggtagacaaaagccgctggcaagagggcaatgtcttcagttgttctgtaatgcacgaagccctccataatcactacacgcagaaatctctgagcttgtctcttgggaaa

SEQ ID NO: 579 - DNA, 1146 bp, Artificial Sequence
  source: /note="Description of Artificial Sequence: Synthetic polynucleotide"
gcccctacgtcctcctcaactaaaaagacgcaacttcagcttgagcatcttcttctcgaccttcagatgattttgaacggaatcaataattacaaaaatcctgaacttactagaatgctcacgtttaagttttatatgccaaaaaaggccactgagttgaaacaccttcaatgcttggaggaggaacttaaaccacttgaggaagccttgaatcttgctccgtccaaaaactttcatttgcggccacgagatctgataagcaacatcaacgtgatcgtcctggaactgaaaggaagcgaaacgacgtttatgtgcgaatatgcagacgaaactgcgacaatcgttgaatttctcaatcgatggatcacttttagccaatctatcatcagcacgttgactggtggtggaggatcgggaggtggaggatctggaggaggaggatcgggtggaggaggatccgaaagtaagtatggccctccttgccctccgtgccctgcacctgagttcctcggcggtccttcagtgtttttgtttccacccaaacctaaagacacccttatgatctctcgaacacctgaagtaacctgtgtagttgttgatgtctcacaggaagatccggaggttcaatttaattggtacgtcgatggtgttgaagtgcataatgcgaagactaagccgagagaggaacagttcaattccacttatcgcgtggtttcagtccttacagtcttgcaccaagattggcttaacggaaaggaatataagtgcaaggtaagtaataaagggcttccatcaagcattgaaaaaaccataagtaaagcaaaaggacaaccgagggagccccaagtctacacgcttcctccttctcaggaggagatgaccaaaaaccaggtaagtttgacgtgtttggtaaaggggttttatccctcagatattgctgtcgaatgggagtctaatggtcagcctgagaacaattacaagactacgccacccgttctggattcagacggatctttcttcctctacagcagattgacggtagacaaaagccgctggcaagagggcaatgtcttcagttgttctgtaatgcacgaagccctccataatcactacacgcagaaatctctgagcttgtctcttgggaaa

SEQ ID NO: 580 - DNA, 1146 bp, Artificial Sequence
  source: /note="Description of Artificial Sequence: Synthetic polynucleotide"
gcccctacgtcctcctcaactaaaaagacgcaacttcagcttgagaaccttcttctcgaccttcagatgattttgaacggaatcaataattacaaaaatcctgaacttactagaatgctcacgtttaagttttatatgccaaaaaaggccactgagttgaaacaccttcaatgcttggaggaggaacttaaaccacttgaggaagccttgaatcttgctccgtccaaaaactttcatttgcggccacgagatctgataagcaacatcaacgtgatcgtcctggaactgaaaggaagcgaaacgacgtttatgtgcgaatatgcagacgaaactgcgacaatcgttgaatttctcaatcgatggatcacttttagccaatctatcatcagcacgttgactggtggtggaggatcgggaggtggaggatctggaggaggaggatcgggtggaggaggatccgaaagtaagtatggccctccttgccctccgtgccctgcacctgagttcctcggcggtccttcagtgtttttgtttccacccaaacctaaagacacccttatgatctctcgaacacctgaagtaacctgtgtagttgttgatgtctcacaggaagatccggaggttcaatttaattggtacgtcgatggtgttgaagtgcataatgcgaagactaagccgagagaggaacagttcaattccacttatcgcgtggtttcagtccttacagtcttgcaccaagattggcttaacggaaaggaatataagtgcaaggtaagtaataaagggcttccatcaagcattgaaaaaaccataagtaaagcaaaaggacaaccgagggagccccaagtctacacgcttcctccttctcaggaggagatgaccaaaaaccaggtaagtttgacgtgtttggtaaaggggttttatccctcagatattgctgtcgaatgggagtctaatggtcagcctgagaacaattacaagactacgccacccgttctggattcagacggatctttcttcctctacagcagattgacggtagacaaaagccgctggcaagagggcaatgtcttcagttgttctgtaatgcacgaagccctccataatcactacacgcagaaatctctgagcttgtctcttgggaaa

SEQ ID NO: 581 - DNA, 1146 bp, Artificial Sequence
  source: /note="Description of Artificial Sequence: Synthetic polynucleotide"
gcccctacgtcctcctcaactaaaaagacgcaacttcagcttgagctgcttcttctcgaccttcagatgattttgaacggaatcaataattacaaaaatcctgaacttactagaatgctcacgtttaagttttatatgccaaaaaaggccactgagttgaaacaccttcaatgcttggaggaggaacttaaaccacttgaggaagccttgaatcttgctccgtccaaaaactttcatttgcggccacgagatctgataagcaacatcaacgtgatcgtcctggaactgaaaggaagcgaaacgacgtttatgtgcgaatatgcagacgaaactgcgacaatcgttgaatttctcaatcgatggatcacttttagccaatctatcatcagcacgttgactggtggtggaggatcgggaggtggaggatctggaggaggaggatcgggtggaggaggatccgaaagtaagtatggccctccttgccctccgtgccctgcacctgagttcctcggcggtccttcagtgtttttgtttccacccaaacctaaagacacccttatgatctctcgaacacctgaagtaacctgtgtagttgttgatgtctcacaggaagatccggaggttcaatttaattggtacgtcgatggtgttgaagtgcataatgcgaagactaagccgagagaggaacagttcaattccacttatcgcgtggtttcagtccttacagtcttgcaccaagattggcttaacggaaaggaatataagtgcaaggtaagtaataaagggcttccatcaagcattgaaaaaaccataagtaaagcaaaaggacaaccgagggagccccaagtctacacgcttcctccttctcaggaggagatgaccaaaaaccaggtaagtttgacgtgtttggtaaaggggttttatccctcagatattgctgtcgaatgggagtctaatggtcagcctgagaacaattacaagactacgccacccgttctggattcagacggatctttcttcctctacagcagattgacggtagacaaaagccgctggcaagagggcaatgtcttcagttgttctgtaatgcacgaagccctccataatcactacacgcagaaatctctgagcttgtctcttgggaaa

SEQ ID NO: 582 - DNA, 1146 bp, Artificial Sequence
  source: /note="Description of Artificial Sequence: Synthetic polynucleotide"
gcccctacgtcctcctcaactaaaaagacgcaacttcagcttgagcatcttcttctcgaccttcagatgattttgaacggaatcaataattacaaaaatcctgaacttactagaatgctcacgtttaagttttatatgccaaaaaaggccactgagttgaaacaccttcaatgcttggaggaggaacttaaaccacttgaggaagccttgaatcttgctccgtccaaaaactttcatttgcggccacgagtgctgataagcaacatcaacgtgatcgtcctggaactgaaaggaagcgaaacgacgtttatgtgcgaatatgcagacgaaactgcgacaatcgttgaatttctcaatcgatggatcacttttagccaatctatcatcagcacgttgactggtggtggaggatcgggaggtggaggatctggaggaggaggatcgggtggaggaggatccgaaagtaagtatggccctccttgccctccgtgccctgcacctgagttcctcggcggtccttcagtgtttttgtttccacccaaacctaaagacacccttatgatctctcgaacacctgaagtaacctgtgtagttgttgatgtctcacaggaagatccggaggttcaatttaattggtacgtcgatggtgttgaagtgcataatgcgaagactaagccgagagaggaacagttcaattccacttatcgcgtggtttcagtccttacagtcttgcaccaagattggcttaacggaaaggaatataagtgcaaggtaagtaataaagggcttccatcaagcattgaaaaaaccataagtaaagcaaaaggacaaccgagggagccccaagtctacacgcttcctccttctcaggaggagatgaccaaaaaccaggtaagtttgacgtgtttggtaaaggggttttatccctcagatattgctgtcgaatgggagtctaatggtcagcctgagaacaattacaagactacgccacccgttctggattcagacggatctttcttcctctacagcagattgacggtagacaaaagccgctggcaagagggcaatgtcttcagttgttctgtaatgcacgaagccctccataatcactacacgcagaaatctctgagcttgtctcttgggaaa

SEQ ID NO: 583 - DNA, 1146 bp, Artificial Sequence
  source: /note="Description of Artificial Sequence: Synthetic polynucleotide"
gcccctacgtcctcctcaactaaaaagacgcaacttcagcttgagcatcttcttctcgaccttcagatgattttgaacggaatcaataattacaaaaatcctgaacttactagaatgctcacgtttaagttttatatgccaaaaaaggccactgagttgaaacaccttcaatgcttggaggaggaacttaaaccacttgaggaagccttgaatcttgctccgtccaaaaactttcatttgcggccacgagatctgataagcaacatcaacgtgagcgtcctggaactgaaaggaagcgaaacgacgtttatgtgcgaatatgcagacgaaactgcgacaatcgttgaatttctcaatcgatggatcacttttagccaatctatcatcagcacgttgactggtggtggaggatcgggaggtggaggatctggaggaggaggatcgggtggaggaggatccgaaagtaagtatggccctccttgccctccgtgccctgcacctgagttcctcggcggtccttcagtgtttttgtttccacccaaacctaaagacacccttatgatctctcgaacacctgaagtaacctgtgtagttgttgatgtctcacaggaagatccggaggttcaatttaattggtacgtcgatggtgttgaagtgcataatgcgaagactaagccgagagaggaacagttcaattccacttatcgcgtggtttcagtccttacagtcttgcaccaagattggcttaacggaaaggaatataagtgcaaggtaagtaataaagggcttccatcaagcattgaaaaaaccataagtaaagcaaaaggacaaccgagggagccccaagtctacacgcttcctccttctcaggaggagatgaccaaaaaccaggtaagtttgacgtgtttggtaaaggggttttatccctcagatattgctgtcgaatgggagtctaatggtcagcctgagaacaattacaagactacgccacccgttctggattcagacggatctttcttcctctacagcagattgacggtagacaaaagccgctggcaagagggcaatgtcttcagttgttctgtaatgcacgaagccctccataatcactacacgcagaaatctctgagcttgtctcttgggaaa

SEQ ID NO: 584 - DNA, 1146 bp, Artificial Sequence
  source: /note="Description of Artificial Sequence: Synthetic polynucleotide"
gcccctacgtcctcctcaactaaaaagacgcaacttcagcttgagcatcttcttctcgaccttcagatgattttgaacggaatcaataattacaaaaatcctaaacttactcagatgctcacgtttaagttttatatgccaaaaaaggccactgagttgaaacaccttcaatgcttggaggaggaacttaaaccacttgaggaagccttgaatcttgctccgtccaaaaactttcatttgcggccacgagatctgataagcaacatcaacgtgatcgtcctggaactgaaaggaagcgaaacgacgtttatgtgcgaatatgcagacgaaactgcgacaatcgttgaatttctcaatcgatggatcacttttagccaatctatcatcagcacgttgactggtggtggaggatcgggaggtggaggatctggaggaggaggatcgggtggaggaggatccgaaagtaagtatggccctccttgccctccgtgccctgcacctgagttcctcggcggtccttcagtgtttttgtttccacccaaacctaaagacacccttatgatctctcgaacacctgaagtaacctgtgtagttgttgatgtctcacaggaagatccggaggttcaatttaattggtacgtcgatggtgttgaagtgcataatgcgaagactaagccgagagaggaacagttcaattccacttatcgcgtggtttcagtccttacagtcttgcaccaagattggcttaacggaaaggaatataagtgcaaggtaagtaataaagggcttccatcaagcattgaaaaaaccataagtaaagcaaaaggacaaccgagggagccccaagtctacacgcttcctccttctcaggaggagatgaccaaaaaccaggtaagtttgacgtgtttggtaaaggggttttatccctcagatattgctgtcgaatgggagtctaatggtcagcctgagaacaattacaagactacgccacccgttctggattcagacggatctttcttcctctacagcagattgacggtagacaaaagccgctggcaagagggcaatgtcttcagttgttctgtaatgcacgaagccctccataatcactacacgcagaaatctctgagcttgtctcttgggaaa

SEQ ID NO: 585 - DNA, 1146 bp, Artificial Sequence
  source: /note="Description of Artificial Sequence: Synthetic polynucleotide"
gcccctacgtcctcctcaactaaaaagacgcaacttcagcttgagaaccttcttctcgaccttcagatgattttgaacggaatcaataattacaaaaatcctaaacttactcagatgctcacgtttaagttttatatgccaaaaaaggccactgagttgaaacaccttcaatgcttggaggaggaacttaaaccacttgaggaagccttgaatcttgctccgtccaaaaactttcatttgcggccacgagatctgataagcaacatcaacgtgatcgtcctggaactgaaaggaagcgaaacgacgtttatgtgcgaatatgcagacgaaactgcgacaatcgttgaatttctcaatcgatggatcacttttagccaatctatcatcagcacgttgactggtggtggaggatcgggaggtggaggatctggaggaggaggatcgggtggaggaggatccgaaagtaagtatggccctccttgccctccgtgccctgcacctgagttcctcggcggtccttcagtgtttttgtttccacccaaacctaaagacacccttatgatctctcgaacacctgaagtaacctgtgtagttgttgatgtctcacaggaagatccggaggttcaatttaattggtacgtcgatggtgttgaagtgcataatgcgaagactaagccgagagaggaacagttcaattccacttatcgcgtggtttcagtccttacagtcttgcaccaagattggcttaacggaaaggaatataagtgcaaggtaagtaataaagggcttccatcaagcattgaaaaaaccataagtaaagcaaaaggacaaccgagggagccccaagtctacacgcttcctccttctcaggaggagatgaccaaaaaccaggtaagtttgacgtgtttggtaaaggggttttatccctcagatattgctgtcgaatgggagtctaatggtcagcctgagaacaattacaagactacgccacccgttctggattcagacggatctttcttcctctacagcagattgacggtagacaaaagccgctggcaagagggcaatgtcttcagttgttctgtaatgcacgaagccctccataatcactacacgcagaaatctctgagcttgtctcttgggaaa

SEQ ID NO: 586 - DNA, 1146 bp, Artificial Sequence
  source: /note="Description of Artificial Sequence: Synthetic polynucleotide"
gcccctacgtcctcctcaactaaaaagacgcaacttcagcttgagctgcttcttctcgaccttcagatgattttgaacggaatcaataattacaaaaatcctaaacttactcagatgctcacgtttaagttttatatgccaaaaaaggccactgagttgaaacaccttcaatgcttggaggaggaacttaaaccacttgaggaagccttgaatcttgctccgtccaaaaactttcatttgcggccacgagatctgataagcaacatcaacgtgatcgtcctggaactgaaaggaagcgaaacgacgtttatgtgcgaatatgcagacgaaactgcgacaatcgttgaatttctcaatcgatggatcacttttagccaatctatcatcagcacgttgactggtggtggaggatcgggaggtggaggatctggaggaggaggatcgggtggaggaggatccgaaagtaagtatggccctccttgccctccgtgccctgcacctgagttcctcggcggtccttcagtgtttttgtttccacccaaacctaaagacacccttatgatctctcgaacacctgaagtaacctgtgtagttgttgatgtctcacaggaagatccggaggttcaatttaattggtacgtcgatggtgttgaagtgcataatgcgaagactaagccgagagaggaacagttcaattccacttatcgcgtggtttcagtccttacagtcttgcaccaagattggcttaacggaaaggaatataagtgcaaggtaagtaataaagggcttccatcaagcattgaaaaaaccataagtaaagcaaaaggacaaccgagggagccccaagtctacacgcttcctccttctcaggaggagatgaccaaaaaccaggtaagtttgacgtgtttggtaaaggggttttatccctcagatattgctgtcgaatgggagtctaatggtcagcctgagaacaattacaagactacgccacccgttctggattcagacggatctttcttcctctacagcagattgacggtagacaaaagccgctggcaagagggcaatgtcttcagttgttctgtaatgcacgaagccctccataatcactacacgcagaaatctctgagcttgtctcttgggaaa

SEQ ID NO: 587 - DNA, 1146 bp, Artificial Sequence
  source: /note="Description of Artificial Sequence: Synthetic polynucleotide"
gcccctacgtcctcctcaactaaaaagacgcaacttcagcttgagcatcttcttctcgaccttcagatgattttgaacggaatcaataattacaaaaatcctaaacttactcagatgctcacgtttaagttttatatgccaaaaaaggccactgagttgaaacaccttcaatgcttggaggaggaacttaaaccacttgaggaagccttgaatcttgctccgtccaaaaactttcatttgcggccacgagtgctgataagcaacatcaacgtgatcgtcctggaactgaaaggaagcgaaacgacgtttatgtgcgaatatgcagacgaaactgcgacaatcgttgaatttctcaatcgatggatcacttttagccaatctatcatcagcacgttgactggtggtggaggatcgggaggtggaggatctggaggaggaggatcgggtggaggaggatccgaaagtaagtatggccctccttgccctccgtgccctgcacctgagttcctcggcggtccttcagtgtttttgtttccacccaaacctaaagacacccttatgatctctcgaacacctgaagtaacctgtgtagttgttgatgtctcacaggaagatccggaggttcaatttaattggtacgtcgatggtgttgaagtgcataatgcgaagactaagccgagagaggaacagttcaattccacttatcgcgtggtttcagtccttacagtcttgcaccaagattggcttaacggaaaggaatataagtgcaaggtaagtaataaagggcttccatcaagcattgaaaaaaccataagtaaagcaaaaggacaaccgagggagccccaagtctacacgcttcctccttctcaggaggagatgaccaaaaaccaggtaagtttgacgtgtttggtaaaggggttttatccctcagatattgctgtcgaatgggagtctaatggtcagcctgagaacaattacaagactacgccacccgttctggattcagacggatctttcttcctctacagcagattgacggtagacaaaagccgctggcaagagggcaatgtcttcagttgttctgtaatgcacgaagccctccataatcactacacgcagaaatctctgagcttgtctcttgggaaa

SEQ ID NO: 588 - DNA, 1146 bp, Artificial Sequence
  source: /note="Description of Artificial Sequence: Synthetic polynucleotide"
gcccctacgtcctcctcaactaaaaagacgcaacttcagcttgagcatcttcttctcgaccttcagatgattttgaacggaatcaataattacaaaaatcctaaacttactcagatgctcacgtttaagttttatatgccaaaaaaggccactgagttgaaacaccttcaatgcttggaggaggaacttaaaccacttgaggaagccttgaatcttgctccgtccaaaaactttcatttgcggccacgagatctgataagcaacatcaacgtgagcgtcctggaactgaaaggaagcgaaacgacgtttatgtgcgaatatgcagacgaaactgcgacaatcgttgaatttctcaatcgatggatcacttttagccaatctatcatcagcacgttgactggtggtggaggatcgggaggtggaggatctggaggaggaggatcgggtggaggaggatccgaaagtaagtatggccctccttgccctccgtgccctgcacctgagttcctcggcggtccttcagtgtttttgtttccacccaaacctaaagacacccttatgatctctcgaacacctgaagtaacctgtgtagttgttgatgtctcacaggaagatccggaggttcaatttaattggtacgtcgatggtgttgaagtgcataatgcgaagactaagccgagagaggaacagttcaattccacttatcgcgtggtttcagtccttacagtcttgcaccaagattggcttaacggaaaggaatataagtgcaaggtaagtaataaagggcttccatcaagcattgaaaaaaccataagtaaagcaaaaggacaaccgagggagccccaagtctacacgcttcctccttctcaggaggagatgaccaaaaaccaggtaagtttgacgtgtttggtaaaggggttttatccctcagatattgctgtcgaatgggagtctaatggtcagcctgagaacaattacaagactacgccacccgttctggattcagacggatctttcttcctctacagcagattgacggtagacaaaagccgctggcaagagggcaatgtcttcagttgttctgtaatgcacgaagccctccataatcactacacgcagaaatctctgagcttgtctcttgggaaa

SEQ ID NO: 589 - DNA, 1146 bp, Artificial Sequence
  source: /note="Description of Artificial Sequence: Synthetic polynucleotide"
gcccctacgtcctcctcaactaaaaagacgcaacttcagcttgagcatcttcttctcgaccttcagatgattttgaacggaatcaataattacaaaaatcctaaacttactaacatgctcacgtttaagttttatatgccaaaaaaggccactgagttgaaacaccttcaatgcttggaggaggaacttaaaccacttgaggaagccttgaatcttgctccgtccaaaaactttcatttgcggccacgagatctgataagcaacatcaacgtgatcgtcctggaactgaaaggaagcgaaacgacgtttatgtgcgaatatgcagacgaaactgcgacaatcgttgaatttctcaatcgatggatcacttttagccaatctatcatcagcacgttgactggtggtggaggatcgggaggtggaggatctggaggaggaggatcgggtggaggaggatccgaaagtaagtatggccctccttgccctccgtgccctgcacctgagttcctcggcggtccttcagtgtttttgtttccacccaaacctaaagacacccttatgatctctcgaacacctgaagtaacctgtgtagttgttgatgtctcacaggaagatccggaggttcaatttaattggtacgtcgatggtgttgaagtgcataatgcgaagactaagccgagagaggaacagttcaattccacttatcgcgtggtttcagtccttacagtcttgcaccaagattggcttaacggaaaggaatataagtgcaaggtaagtaataaagggcttccatcaagcattgaaaaaaccataagtaaagcaaaaggacaaccgagggagccccaagtctacacgcttcctccttctcaggaggagatgaccaaaaaccaggtaagtttgacgtgtttggtaaaggggttttatccctcagatattgctgtcgaatgggagtctaatggtcagcctgagaacaattacaagactacgccacccgttctggattcagacggatctttcttcctctacagcagattgacggtagacaaaagccgctggcaagagggcaatgtcttcagttgttctgtaatgcacgaagccctccataatcactacacgcagaaatctctgagcttgtctcttgggaaa

SEQ ID NO: 590 - DNA, 1146 bp, Artificial Sequence
  source: /note="Description of Artificial Sequence: Synthetic polynucleotide"
gcccctacgtcctcctcaactaaaaagacgcaacttcagcttgagaaccttcttctcgaccttcagatgattttgaacggaatcaataattacaaaaatcctaaacttactaacatgctcacgtttaagttttatatgccaaaaaaggccactgagttgaaacaccttcaatgcttggaggaggaacttaaaccacttgaggaagccttgaatcttgctccgtccaaaaactttcatttgcggccacgagatctgataagcaacatcaacgtgatcgtcctggaactgaaaggaagcgaaacgacgtttatgtgcgaatatgcagacgaaactgcgacaatcgttgaatttctcaatcgatggatcacttttagccaatctatcatcagcacgttgactggtggtggaggatcgggaggtggaggatctggaggaggaggatcgggtggaggaggatccgaaagtaagtatggccctccttgccctccgtgccctgcacctgagttcctcggcggtccttcagtgtttttgtttccacccaaacctaaagacacccttatgatctctcgaacacctgaagtaacctgtgtagttgttgatgtctcacaggaagatccggaggttcaatttaattggtacgtcgatggtgttgaagtgcataatgcgaagactaagccgagagaggaacagttcaattccacttatcgcgtggtttcagtccttacagtcttgcaccaagattggcttaacggaaaggaatataagtgcaaggtaagtaataaagggcttccatcaagcattgaaaaaaccataagtaaagcaaaaggacaaccgagggagccccaagtctacacgcttcctccttctcaggaggagatgaccaaaaaccaggtaagtttgacgtgtttggtaaaggggttttatccctcagatattgctgtcgaatgggagtctaatggtcagcctgagaacaattacaagactacgccacccgttctggattcagacggatctttcttcctctacagcagattgacggtagacaaaagccgctggcaagagggcaatgtcttcagttgttctgtaatgcacgaagccctccataatcactacacgcagaaatctctgagcttgtctcttgggaaa

SEQ ID NO: 591 - DNA, 1146 bp, Artificial Sequence
  source: /note="Description of Artificial Sequence: Synthetic polynucleotide"
gcccctacgtcctcctcaactaaaaagacgcaacttcagcttgagttgcttcttctcgaccttcagatgattttgaacggaatcaataattacaaaaatcctaaacttactaacatgctcacgtttaagttttatatgccaaaaaaggccactgagttgaaacaccttcaatgcttggaggaggaacttaaaccacttgaggaagccttgaatcttgctccgtccaaaaactttcatttgcggccacgagatctgataagcaacatcaacgtgatcgtcctggaactgaaaggaagcgaaacgacgtttatgtgcgaatatgcagacgaaactgcgacaatcgttgaatttctcaatcgatggatcacttttagccaatctatcatcagcacgttgactggtggtggaggatcgggaggtggaggatctggaggaggaggatcgggtggaggaggatccgaaagtaagtatggccctccttgccctccgtgccctgcacctgagttcctcggcggtccttcagtgtttttgtttccacccaaacctaaagacacccttatgatctctcgaacacctgaagtaacctgtgtagttgttgatgtctcacaggaagatccggaggttcaatttaattggtacgtcgatggtgttgaagtgcataatgcgaagactaagccgagagaggaacagttcaattccacttatcgcgtggtttcagtccttacagtcttgcaccaagattggcttaacggaaaggaatataagtgcaaggtaagtaataaagggcttccatcaagcattgaaaaaaccataagtaaagcaaaaggacaaccgagggagccccaagtctacacgcttcctccttctcaggaggagatgaccaaaaaccaggtaagtttgacgtgtttggtaaaggggttttatccctcagatattgctgtcgaatgggagtctaatggtcagcctgagaacaattacaagactacgccacccgttctggattcagacggatctttcttcctctacagcagattgacggtagacaaaagccgctggcaagagggcaatgtcttcagttgttctgtaatgcacgaagccctccataatcactacacgcagaaatctctgagcttgtctcttgggaaa

SEQ ID NO: 592 - DNA, 1146 bp, Artificial Sequence
  source: /note="Description of Artificial Sequence: Synthetic polynucleotide"
gcccctacgtcctcctcaactaaaaagacgcaacttcagcttgagcatcttcttctcgaccttcagatgattttgaacggaatcaataattacaaaaatcctaaacttactaacatgctcacgtttaagttttatatgccaaaaaaggccactgagttgaaacaccttcaatgcttggaggaggaacttaaaccacttgaggaagccttgaatcttgctccgtccaaaaactttcatttgcggccacgagtcctgataagcaacatcaacgtgatcgtcctggaactgaaaggaagcgaaacgacgtttatgtgcgaatatgcagacgaaactgcgacaatcgttgaatttctcaatcgatggatcacttttagccaatctatcatcagcacgttgactggtggtggaggatcgggaggtggaggatctggaggaggaggatcgggtggaggaggatccgaaagtaagtatggccctccttgccctccgtgccctgcacctgagttcctcggcggtccttcagtgtttttgtttccacccaaacctaaagacacccttatgatctctcgaacacctgaagtaacctgtgtagttgttgatgtctcacaggaagatccggaggttcaatttaattggtacgtcgatggtgttgaagtgcataatgcgaagactaagccgagagaggaacagttcaattccacttatcgcgtggtttcagtccttacagtcttgcaccaagattggcttaacggaaaggaatataagtgcaaggtaagtaataaagggcttccatcaagcattgaaaaaaccataagtaaagcaaaaggacaaccgagggagccccaagtctacacgcttcctccttctcaggaggagatgaccaaaaaccaggtaagtttgacgtgtttggtaaaggggttttatccctcagatattgctgtcgaatgggagtctaatggtcagcctgagaacaattacaagactacgccacccgttctggattcagacggatctttcttcctctacagcagattgacggtagacaaaagccgctggcaagagggcaatgtcttcagttgttctgtaatgcacgaagccctccataatcactacacgcagaaatctctgagcttgtctcttgggaaa

SEQ ID NO: 593 - DNA, 1146 bp, Artificial Sequence
  source: /note="Description of Artificial Sequence: Synthetic polynucleotide"
gcccctacgtcctcctcaactaaaaagacgcaacttcagcttgagcatcttcttctcgaccttcagatgattttgaacggaatcaataattacaaaaatcctaaacttactaacatgctcacgtttaagttttatatgccaaaaaaggccactgagttgaaacaccttcaatgcttggaggaggaacttaaaccacttgaggaagccttgaatcttgctccgtccaaaaactttcatttgcggccacgagatctgataagcaacatcaacgtgagcgtcctggaactgaaaggaagcgaaacgacgtttatgtgcgaatatgcagacgaaactgcgacaatcgttgaatttctcaatcgatggatcacttttagccaatctatcatcagcacgttgactggtggtggaggatcgggaggtggaggatctggaggaggaggatcgggtggaggaggatccgaaagtaagtatggccctccttgccctccgtgccctgcacctgagttcctcggcggtccttcagtgtttttgtttccacccaaacctaaagacacccttatgatctctcgaacacctgaagtaacctgtgtagttgttgatgtctcacaggaagatccggaggttcaatttaattggtacgtcgatggtgttgaagtgcataatgcgaagactaagccgagagaggaacagttcaattccacttatcgcgtggtttcagtccttacagtcttgcaccaagattggcttaacggaaaggaatataagtgcaaggtaagtaataaagggcttccatcaagcattgaaaaaaccataagtaaagcaaaaggacaaccgagggagccccaagtctacacgcttcctccttctcaggaggagatgaccaaaaaccaggtaagtttgacgtgtttggtaaaggggttttatccctcagatattgctgtcgaatgggagtctaatggtcagcctgagaacaattacaagactacgccacccgttctggattcagacggatctttcttcctctacagcagattgacggtagacaaaagccgctggcaagagggcaatgtcttcagttgttctgtaatgcacgaagccctccataatcactacacgcagaaatctctgagcttgtctcttgggaaa

SEQ ID NO: 594 - DNA, 1146 bp, Artificial Sequence
  source: /note="Description of Artificial Sequence: Synthetic polynucleotide"
gcccctacgtcctcctcaactaaaaagacgcaacttcagcttgagcatcttcttctcgaccttcagatgattttgaacggaatcaataattacaaaaatcctaaacttactgaaatgctcacgtttaagttttatatgccaaaaaaggccactgagttgaaacaccttcaatgcttggaggaggaacttaaaccacttgaggaagccttgaatcttgctccgtccaaaaactttcatttgcggccacgagatctgataagcaacatcaacgtgatcgtcctggaactgaaaggaagcgaaacgacgtttatgtgcgaatatgcagacgaaactgcgacaatcgttgaatttctcaatcgatggatcacttttagccaatctatcatcagcacgttgactggtggtggaggatcgggaggtggaggatctggaggaggaggatcgggtggaggaggatccgaaagtaagtatggccctccttgccctccgtgccctgcacctgagttcctcggcggtccttcagtgtttttgtttccacccaaacctaaagacacccttatgatctctcgaacacctgaagtaacctgtgtagttgttgatgtctcacaggaagatccggaggttcaatttaattggtacgtcgatggtgttgaagtgcataatgcgaagactaagccgagagaggaacagttcaattccacttatcgcgtggtttcagtccttacagtcttgcaccaagattggcttaacggaaaggaatataagtgcaaggtaagtaataaagggcttccatcaagcattgaaaaaaccataagtaaagcaaaaggacaaccgagggagccccaagtctacacgcttcctccttctcaggaggagatgaccaaaaaccaggtaagtttgacgtgtttggtaaaggggttttatccctcagatattgctgtcgaatgggagtctaatggtcagcctgagaacaattacaagactacgccacccgttctggattcagacggatctttcttcctctacagcagattgacggtagacaaaagccgctggcaagagggcaatgtcttcagttgttctgtaatgcacgaagccctccataatcactacacgcagaaatctctgagcttgtctcttgggaaa

SEQ ID NO: 595 - DNA, 1146 bp, Artificial Sequence
  source: /note="Description of Artificial Sequence: Synthetic polynucleotide"
gcccctacgtcctcctcaactaaaaagacgcaacttcagcttgagcatcttcttctcgaccttcagatgattttgaacggaatcaataattacaaaaatcctaaacttactagaatgctcacgaagaagttttatatgccaaaaaaggccactgagttgaaacaccttcaatgcttggaggaggaacttaaaccacttgaggaagccttgaatcttgctccgtccaaaaactttcatttgcggccacgagatctgataagcaacatcaacgtgatcgtcctggaactgaaaggaagcgaaacgacgtttatgtgcgaatatgcagacgaaactgcgacaatcgttgaatttctcaatcgatggatcacttttagccaatctatcatcagcacgttgactggtggtggaggatcgggaggtggaggatctggaggaggaggatcgggtggaggaggatccgaaagtaagtatggccctccttgccctccgtgccctgcacctgagttcctcggcggtccttcagtgtttttgtttccacccaaacctaaagacacccttatgatctctcgaacacctgaagtaacctgtgtagttgttgatgtctcacaggaagatccggaggttcaatttaattggtacgtcgatggtgttgaagtgcataatgcgaagactaagccgagagaggaacagttcaattccacttatcgcgtggtttcagtccttacagtcttgcaccaagattggcttaacggaaaggaatataagtgcaaggtaagtaataaagggcttccatcaagcattgaaaaaaccataagtaaagcaaaaggacaaccgagggagccccaagtctacacgcttcctccttctcaggaggagatgaccaaaaaccaggtaagtttgacgtgtttggtaaaggggttttatccctcagatattgctgtcgaatgggagtctaatggtcagcctgagaacaattacaagactacgccacccgttctggattcagacggatctttcttcctctacagcagattgacggtagacaaaagccgctggcaagagggcaatgtcttcagttgttctgtaatgcacgaagccctccataatcactacacgcagaaatctctgagcttgtctcttgggaaa

SEQ ID NO: 596 - DNA, 1146 bp, Artificial Sequence
  source: /note="Description of Artificial Sequence: Synthetic polynucleotide"
gcccctacgtcctcctcaactaaaaagacgcaacttcagcttgagcatcttcttctcgaccttcagatgattttgaacggaatcaataattacaaaaatcctaaacttactagaatgctcacgcagaagttttatatgccaaaaaaggccactgagttgaaacaccttcaatgcttggaggaggaacttaaaccacttgaggaagccttgaatcttgctccgtccaaaaactttcatttgcggccacgagatctgataagcaacatcaacgtgatcgtcctggaactgaaaggaagcgaaacgacgtttatgtgcgaatatgcagacgaaactgcgacaatcgttgaatttctcaatcgatggatcacttttagccaatctatcatcagcacgttgactggtggtggaggatcgggaggtggaggatctggaggaggaggatcgggtggaggaggatccgaaagtaagtatggccctccttgccctccgtgccctgcacctgagttcctcggcggtccttcagtgtttttgtttccacccaaacctaaagacacccttatgatctctcgaacacctgaagtaacctgtgtagttgttgatgtctcacaggaagatccggaggttcaatttaattggtacgtcgatggtgttgaagtgcataatgcgaagactaagccgagagaggaacagttcaattccacttatcgcgtggtttcagtccttacagtcttgcaccaagattggcttaacggaaaggaatataagtgcaaggtaagtaataaagggcttccatcaagcattgaaaaaaccataagtaaagcaaaaggacaaccgagggagccccaagtctacacgcttcctccttctcaggaggagatgaccaaaaaccaggtaagtttgacgtgtttggtaaaggggttttatccctcagatattgctgtcgaatgggagtctaatggtcagcctgagaacaattacaagactacgccacccgttctggattcagacggatctttcttcctctacagcagattgacggtagacaaaagccgctggcaagagggcaatgtcttcagttgttctgtaatgcacgaagccctccataatcactacacgcagaaatctctgagcttgtctcttgggaaa

SEQ ID NO: 597 - DNA, 1146 bp, Artificial Sequence
  source: /note="Description of Artificial Sequence: Synthetic polynucleotide"
gcccctacgtcctcctcaactaaaaagacgcaacttcagcttgagcatcttcttctcgaccttcagatgattttgaacggaatcaataattacaaaaatcctaaacttactagaatgctcacggcaaagtttgctatgccaaaaaaggccactgagttgaaacaccttcaatgcttggaggaggaacttaaaccacttgaggaagccttgaatggtgctccgtccaaaaactttcatttgcggccacgagatctgataagcgatatcaacgtgatcgtcctggaactgaaaggaagcgaaacgacgtttatgtgcgaatatgcagacgaaactgcgacaatcgttgaatttctcaatcgatggatcacttttagccaatctatcatcagcacgttgactggtggtggaggatcgggaggtggaggatctggaggaggaggatcgggtggaggaggatccgaaagtaagtatggccctccttgccctccgtgccctgcacctgagttcctcggcggtccttcagtgtttttgtttccacccaaacctaaagacacccttatgatctctcgaacacctgaagtaacctgtgtagttgttgatgtctcacaggaagatccggaggttcaatttaattggtacgtcgatggtgttgaagtgcataatgcgaagactaagccgagagaggaacagttcaattccacttatcgcgtggtttcagtccttacagtcttgcaccaagattggcttaacggaaaggaatataagtgcaaggtaagtaataaagggcttccatcaagcattgaaaaaaccataagtaaagcaaaaggacaaccgagggagccccaagtctacacgcttcctccttctcaggaggagatgaccaaaaaccaggtaagtttgacgtgtttggtaaaggggttttatccctcagatattgctgtcgaatgggagtctaatggtcagcctgagaacaattacaagactacgccacccgttctggattcagacggatctttcttcctctacagcagattgacggtagacaaaagccgctggcaagagggcaatgtcttcagttgttctgtaatgcacgaagccctccataatcactacacgcagaaatctctgagcttgtctcttgggaaa

SEQ ID NO: 598 - DNA, 1146 bp, Artificial Sequence
  source: /note="Description of Artificial Sequence: Synthetic polynucleotide"
gcccctacgtcctcctcaactaaaaagacgcaacttcagcttgagcatcttcttctcgaccttcagatgattttgaacggaatcaataattacaaaaatcctaaacttactaacatgctcacgtttaagttttatatgccaaaaaaggccactgagttgaaacaccttcaatgcttggaggaggaacttaaaccacttgaggaagccttgaatcttgctccgtccaaaaactttcatttgcggccacgagatctgataaggaacatcaacgtgatcgtcctggaactgaaaggaagcgaaacgacgtttatgtgcgaatatgcagacgaaactgcgacaatcgttgaatttctcaatcgatggatcacttttagccaatctatcatcagcacgttgactggtggtggaggatcgggaggtggaggatctggaggaggaggatcgggtggaggaggatccgaaagtaagtatggccctccttgccctccgtgccctgcacctgagttcctcggcggtccttcagtgtttttgtttccacccaaacctaaagacacccttatgatctctcgaacacctgaagtaacctgtgtagttgttgatgtctcacaggaagatccggaggttcaatttaattggtacgtcgatggtgttgaagtgcataatgcgaagactaagccgagagaggaacagttcaattccacttatcgcgtggtttcagtccttacagtcttgcaccaagattggcttaacggaaaggaatataagtgcaaggtaagtaataaagggcttccatcaagcattgaaaaaaccataagtaaagcaaaaggacaaccgagggagccccaagtctacacgcttcctccttctcaggaggagatgaccaaaaaccaggtaagtttgacgtgtttggtaaaggggttttatccctcagatattgctgtcgaatgggagtctaatggtcagcctgagaacaattacaagactacgccacccgttctggattcagacggatctttcttcctctacagcagattgacggtagacaaaagccgctggcaagagggcaatgtcttcagttgttctgtaatgcacgaagccctccataatcactacacgcagaaatctctgagcttgtctcttgggaaa

SEQ ID NO: 599 - DNA, 1146 bp, Artificial Sequence
  source: /note="Description of Artificial Sequence: Synthetic polynucleotide"
gcccctacgtcctcctcaactaaaaagacgcaacttcagcttgagaaccttcttctcgaccttcagatgattttgaacggaatcaataattacaaaaatcctaaacttactgaaatgctcacgtttaagttttatatgccaaaaaaggccactgagttgaaacaccttcaatgcttggaggaggaacttaaaccacttgaggaagccttgaatcttgctccgtccaaaaactttcatttgcggccacgagatctgataagcaacatcaacgtgatcgtcctggaactgaaaggaagcgaaacgacgtttatgtgcgaatatgcagacgaaactgcgacaatcgttgaatttctcaatcgatggatcacttttagccaatctatcatcagcacgttgactggtggtggaggatcgggaggtggaggatctggaggaggaggatcgggtggaggaggatccgaaagtaagtatggccctccttgccctccgtgccctgcacctgagttcctcggcggtccttcagtgtttttgtttccacccaaacctaaagacacccttatgatctctcgaacacctgaagtaacctgtgtagttgttgatgtctcacaggaagatccggaggttcaatttaattggtacgtcgatggtgttgaagtgcataatgcgaagactaagccgagagaggaacagttcaattccacttatcgcgtggtttcagtccttacagtcttgcaccaagattggcttaacggaaaggaatataagtgcaaggtaagtaataaagggcttccatcaagcattgaaaaaaccataagtaaagcaaaaggacaaccgagggagccccaagtctacacgcttcctccttctcaggaggagatgaccaaaaaccaggtaagtttgacgtgtttggtaaaggggttttatccctcagatattgctgtcgaatgggagtctaatggtcagcctgagaacaattacaagactacgccacccgttctggattcagacggatctttcttcctctacagcagattgacggtagacaaaagccgctggcaagagggcaatgtcttcagttgttctgtaatgcacgaagccctccataatcactacacgcagaaatctctgagcttgtctcttgggaaa

SEQ ID NO: 600 - DNA, 1146 bp, Artificial Sequence
  source: /note="Description of Artificial Sequence: Synthetic polynucleotide"
gcccctacgtcctcctcaactaaaaagacgcaacttcagcttgagcatcttcttctcgaccttcagatgattttgaacggaatcaataattacaaaaatcctaaacttactgaaatgctcacgtttaagttttatatgccaaaaaaggccactgagttgaaacaccttcaatgcttggaggaggaacttaaaccacttgaggaagccttgaatcttgctccgtccaaaaactttcatttgcggccacgagtcctgataagcaacatcaacgtgatcgtcctggaactgaaaggaagcgaaacgacgtttatgtgcgaatatgcagacgaaactgcgacaatcgttgaatttctcaatcgatggatcacttttagccaatctatcatcagcacgttgactggtggtggaggatcgggaggtggaggatctggaggaggaggatcgggtggaggaggatccgaaagtaagtatggccctccttgccctccgtgccctgcacctgagttcctcggcggtccttcagtgtttttgtttccacccaaacctaaagacacccttatgatctctcgaacacctgaagtaacctgtgtagttgttgatgtctcacaggaagatccggaggttcaatttaattggtacgtcgatggtgttgaagtgcataatgcgaagactaagccgagagaggaacagttcaattccacttatcgcgtggtttcagtccttacagtcttgcaccaagattggcttaacggaaaggaatataagtgcaaggtaagtaataaagggcttccatcaagcattgaaaaaaccataagtaaagcaaaaggacaaccgagggagccccaagtctacacgcttcctccttctcaggaggagatgaccaaaaaccaggtaagtttgacgtgtttggtaaaggggttttatccctcagatattgctgtcgaatgggagtctaatggtcagcctgagaacaattacaagactacgccacccgttctggattcagacggatctttcttcctctacagcagattgacggtagacaaaagccgctggcaagagggcaatgtcttcagttgttctgtaatgcacgaagccctccataatcactacacgcagaaatctctgagcttgtctcttgggaaa

SEQ ID NO: 601 - DNA, 1146 bp, Artificial Sequence
  source: /note="Description of Artificial Sequence: Synthetic polynucleotide"
gcccctacgtcctcctcaactaaaaagacgcaacttcagcttgagcatcttcttctcgaccttcagatgattttgaacggaatcaataattacaaaaatcctaaacttactgaaatgctcacgtttaagttttatatgccaaaaaaggccactgagttgaaacaccttcaatgcttggaggaggaacttaaaccacttgaggaagccttgaatcttgctccgtccaaaaactttcatttgcggccacgagatctgataaggaacatcaacgtgatcgtcctggaactgaaaggaagcgaaacgacgtttatgtgcgaatatgcagacgaaactgcgacaatcgttgaatttctcaatcgatggatcacttttagccaatctatcatcagcacgttgactggtggtggaggatcgggaggtggaggatctggaggaggaggatcgggtggaggaggatccgaaagtaagtatggccctccttgccctccgtgccctgcacctgagttcctcggcggtccttcagtgtttttgtttccacccaaacctaaagacacccttatgatctctcgaacacctgaagtaacctgtgtagttgttgatgtctcacaggaagatccggaggttcaatttaattggtacgtcgatggtgttgaagtgcataatgcgaagactaagccgagagaggaacagttcaattccacttatcgcgtggtttcagtccttacagtcttgcaccaagattggcttaacggaaaggaatataagtgcaaggtaagtaataaagggcttccatcaagcattgaaaaaaccataagtaaagcaaaaggacaaccgagggagccccaagtctacacgcttcctccttctcaggaggagatgaccaaaaaccaggtaagtttgacgtgtttggtaaaggggttttatccctcagatattgctgtcgaatgggagtctaatggtcagcctgagaacaattacaagactacgccacccgttctggattcagacggatctttcttcctctacagcagattgacggtagacaaaagccgctggcaagagggcaatgtcttcagttgttctgtaatgcacgaagccctccataatcactacacgcagaaatctctgagcttgtctcttgggaaa

SEQ ID NO: 602 - DNA, 1146 bp, Artificial Sequence
  source: /note="Description of Artificial Sequence: Synthetic polynucleotide"
gcccctacgtcctcctcaactaaaaagacgcaacttcagcttgagcatcttcttctcgaccttcagatgattttgaacggaatcaataattacaaaaatcctaaacttactgaaatgctcacgtttaagttttatatgccaaaaaaggccactgagttgaaacaccttcaatgcttggaggaggaacttaaaccacttgaggaagccttgaatcttgctccgtccaaaaactttcatttgcggccacgagatctgataagcaacatcaacgtgagcgtcctggaactgaaaggaagcgaaacgacgtttatgtgcgaatatgcagacgaaactgcgacaatcgttgaatttctcaatcgatggatcacttttagccaatctatcatcagcacgttgactggtggtggaggatcgggaggtggaggatctggaggaggaggatcgggtggaggaggatccgaaagtaagtatggccctccttgccctccgtgccctgcacctgagttcctcggcggtccttcagtgtttttgtttccacccaaacctaaagacacccttatgatctctcgaacacctgaagtaacctgtgtagttgttgatgtctcacaggaagatccggaggttcaatttaattggtacgtcgatggtgttgaagtgcataatgcgaagactaagccgagagaggaacagttcaattccacttatcgcgtggtttcagtccttacagtcttgcaccaagattggcttaacggaaaggaatataagtgcaaggtaagtaataaagggcttccatcaagcattgaaaaaaccataagtaaagcaaaaggacaaccgagggagccccaagtctacacgcttcctccttctcaggaggagatgaccaaaaaccaggtaagtttgacgtgtttggtaaaggggttttatccctcagatattgctgtcgaatgggagtctaatggtcagcctgagaacaattacaagactacgccacccgttctggattcagacggatctttcttcctctacagcagattgacggtagacaaaagccgctggcaagagggcaatgtcttcagttgttctgtaatgcacgaagccctccataatcactacacgcagaaatctctgagcttgtctcttgggaaa

SEQ ID NO: 603 - DNA, 1146 bp, Artificial Sequence
  source: /note="Description of Artificial Sequence: Synthetic polynucleotide"
gcccctacgtcctcctcaactaaaaagacgcaacttcagcttgagaaccttcttctcgaccttcagatgattttgaacggaatcaataattacaaaaatcctaaacttactagaatgctcacgcagaagttttatatgccaaaaaaggccactgagttgaaacaccttcaatgcttggaggaggaacttaaaccacttgaggaagccttgaatcttgctccgtccaaaaactttcatttgcggccacgagatctgataagcaacatcaacgtgatcgtcctggaactgaaaggaagcgaaacgacgtttatgtgcgaatatgcagacgaaactgcgacaatcgttgaatttctcaatcgatggatcacttttagccaatctatcatcagcacgttgactggtggtggaggatcgggaggtggaggatctggaggaggaggatcgggtggaggaggatccgaaagtaagtatggccctccttgccctccgtgccctgcacctgagttcctcggcggtccttcagtgtttttgtttccacccaaacctaaagacacccttatgatctctcgaacacctgaagtaacctgtgtagttgttgatgtctcacaggaagatccggaggttcaatttaattggtacgtcgatggtgttgaagtgcataatgcgaagactaagccgagagaggaacagttcaattccacttatcgcgtggtttcagtccttacagtcttgcaccaagattggcttaacggaaaggaatataagtgcaaggtaagtaataaagggcttccatcaagcattgaaaaaaccataagtaaagcaaaaggacaaccgagggagccccaagtctacacgcttcctccttctcaggaggagatgaccaaaaaccaggtaagtttgacgtgtttggtaaaggggttttatccctcagatattgctgtcgaatgggagtctaatggtcagcctgagaacaattacaagactacgccacccgttctggattcagacggatctttcttcctctacagcagattgacggtagacaaaagccgctggcaagagggcaatgtcttcagttgttctgtaatgcacgaagccctccataatcactacacgcagaaatctctgagcttgtctcttgggaaa

SEQ ID NO: 604 - DNA, 1146 bp, Artificial Sequence
  source: /note="Description of Artificial Sequence: Synthetic polynucleotide"
gcccctacgtcctcctcaactaaaaagacgcaacttcagcttgagcatcttcttctcgaccttcagatgattttgaacggaatcaataattacaaaaatcctaaacttactagaatgctcacgcagaagttttatatgccaaaaaaggccactgagttgaaacaccttcaatgcttggaggaggaacttaaaccacttgaggaagccttgaatcttgctccgtccaaaaactttcatttgcggccacgagatctgataagcaacatcaacgtgagcgtcctggaactgaaaggaagcgaaacgacgtttatgtgcgaatatgcagacgaaactgcgacaatcgttgaatttctcaatcgatggatcacttttagccaatctatcatcagcacgttgactggtggtggaggatcgggaggtggaggatctggaggaggaggatcgggtggaggaggatccgaaagtaagtatggccctccttgccctccgtgccctgcacctgagttcctcggcggtccttcagtgtttttgtttccacccaaacctaaagacacccttatgatctctcgaacacctgaagtaacctgtgtagttgttgatgtctcacaggaagatccggaggttcaatttaattggtacgtcgatggtgttgaagtgcataatgcgaagactaagccgagagaggaacagttcaattccacttatcgcgtggtttcagtccttacagtcttgcaccaagattggcttaacggaaaggaatataagtgcaaggtaagtaataaagggcttccatcaagcattgaaaaaaccataagtaaagcaaaaggacaaccgagggagccccaagtctacacgcttcctccttctcaggaggagatgaccaaaaaccaggtaagtttgacgtgtttggtaaaggggttttatccctcagatattgctgtcgaatgggagtctaatggtcagcctgagaacaattacaagactacgccacccgttctggattcagacggatctttcttcctctacagcagattgacggtagacaaaagccgctggcaagagggcaatgtcttcagttgttctgtaatgcacgaagccctccataatcactacacgcagaaatctctgagcttgtctcttgggaaa

SEQ ID NO: 605 - DNA, 1146 bp, Artificial Sequence
  source: /note="Description of Artificial Sequence: Synthetic polynucleotide"
gcccctacgtcctcctcaactaaaaagacgcaacttcagcttgagaaccttcttctcgaccttcagatgattttgaacggaatcaataattacaaaaatcctgaacttactaacatgctcacgtttaagttttatatgccaaaaaaggccactgagttgaaacaccttcaatgcttggaggaggaacttaaaccacttgaggaagccttgaatcttgctccgtccaaaaactttcatttgcggccacgagatctgataagcaacatcaacgtgatcgtcctggaactgaaaggaagcgaaacgacgtttatgtgcgaatatgcagacgaaactgcgacaatcgttgaatttctcaatcgatggatcacttttagccaatctatcatcagcacgttgactggtggtggaggatcgggaggtggaggatctggaggaggaggatcgggtggaggaggatccgaaagtaagtatggccctccttgccctccgtgccctgcacctgagttcctcggcggtccttcagtgtttttgtttccacccaaacctaaagacacccttatgatctctcgaacacctgaagtaacctgtgtagttgttgatgtctcacaggaagatccggaggttcaatttaattggtacgtcgatggtgttgaagtgcataatgcgaagactaagccgagagaggaacagttcaattccacttatcgcgtggtttcagtccttacagtcttgcaccaagattggcttaacggaaaggaatataagtgcaaggtaagtaataaagggcttccatcaagcattgaaaaaaccataagtaaagcaaaaggacaaccgagggagccccaagtctacacgcttcctccttctcaggaggagatgaccaaaaaccaggtaagtttgacgtgtttggtaaaggggttttatccctcagatattgctgtcgaatgggagtctaatggtcagcctgagaacaattacaagactacgccacccgttctggattcagacggatctttcttcctctacagcagattgacggtagacaaaagccgctggcaagagggcaatgtcttcagttgttctgtaatgcacgaagccctccataatcactacacgcagaaatctctgagcttgtctcttgggaaa

SEQ ID NO: 606 - DNA, 1146 bp, Artificial Sequence
  source: /note="Description of Artificial Sequence: Synthetic polynucleotide"
gcccctacgtcctcctcaactaaaaagacgcaacttcagcttgagcatcttcttctcgaccttcagatgattttgaacggaatcaataattacaaaaatcctaaacttactagaatgctcacgtttaagttttatatgccaaaaaaggccactgagttgaaacaccttcaatgcttggaggaggaacttaaaccacttgaggaagtattgaatcttgctcagtccaaaaactttcatttgcggccacgagatctgataagcaacatcaacgtgatcgtcctggaactgaaaggaagcgaaacgacgtttatgtgcgaatatgcagacgaaactgcgacaatcgttgaatttctcaatcgatggatcacttttagccaatctatcatcagcacgttgactggtggtggaggatcgggaggtggaggatctggaggaggaggatcgggtggaggaggatccgaaagtaagtatggccctccttgccctccgtgccctgcacctgagttcctcggcggtccttcagtgtttttgtttccacccaaacctaaagacacccttatgatctctcgaacacctgaagtaacctgtgtagttgttgatgtctcacaggaagatccggaggttcaatttaattggtacgtcgatggtgttgaagtgcataatgcgaagactaagccgagagaggaacagttcaattccacttatcgcgtggtttcagtccttacagtcttgcaccaagattggcttaacggaaaggaatataagtgcaaggtaagtaataaagggcttccatcaagcattgaaaaaaccataagtaaagcaaaaggacaaccgagggagccccaagtctacacgcttcctccttctcaggaggagatgaccaaaaaccaggtaagtttgacgtgtttggtaaaggggttttatccctcagatattgctgtcgaatgggagtctaatggtcagcctgagaacaattacaagactacgccacccgttctggattcagacggatctttcttcctctacagcaaattgacggtagacaaaagccgctggcaagagggcaatgtcttcagttgttctgtaatgcacgaagccctccataatcactacacgcagaaatctctgagcttgtctcttgggaaa

SEQ ID NO: 607 - DNA, 1146 bp, Artificial Sequence
  source: /note="Description of Artificial Sequence: Synthetic polynucleotide"
gcccctacgtcctcctcaactaaaaagacgcaacttcagcttgagcatcttcttctcgaccttcagatgattttgaacggaatcaataattacaaaaatcctaaacttactagaatgctcacgtttaagttttatatgccaaaaaaggccactgagttgaaacaccttcaatgcttggaggaggaacttaaaccacttgaggaagccttgaatcttgctccgtccaaaaactttcatttgcggccacgagatctgataagcaacatcaacgtgatcgtcctggaactgaaaggaagcgaaacgacgtttatgtgcgaatatgcagacgaaactgcgacaatcgttgaatttctcaatcgatggatcacttttagccaatctatcatcagcacgttgactggtggtggaggatcgggaggtggaggatctggaggaggaggatcgggtggaggaggatccgaaagtaagtatggccctccttgccctccgtgccctgcacctgagttcctcggcggtccttcagtgtttttgtttccacccaaacctaaagacacccttatgatctctcgaacacctgaagtaacctgtgtagttgttgatgtctcacaggaagatccggaggttcaatttaattggtacgtcgatggtgttgaagtgcataatgcgaagactaagccgagagaggaacagttcaattccacttatcgcgtggtttcagtccttacagtcttgcaccaagattggcttaacggaaaggaatataagtgcaaggtaagtaataaagggcttccatcaagcattgaaaaaaccataagtaaagcaaaaggacaaccgagggagccccaagtctacacgcttcctccttctcaggaggagatgaccaaaaaccaggtaagtttgacgtgtttggtaaaggggttttatccctcagatattgctgtcgaatgggagtctaatggtcagcctgagaacaattacaagactacgccacccgttctggattcagacggatctttcttcctctacagcaaattgacggtagacaaaagccgctggcaagagggcaatgtcttcagttgttctgtaatgcacgaagccctccataatcactacacgcagaaatctctgagcttgtctcttgggaaa

SEQ ID NO: 608 - DNA, 1146 bp, Artificial Sequence
  source: /note="Description of Artificial Sequence: Synthetic polynucleotide"
gcccctacgtcctcctcaactaaaaagacgcaacttcagcttgaggatcttcttctcgaccttcagatgattttgaacggaatcaataattacaaaaatcctaaacttactagaatgctcacgtttaagttttatatgccaaaaaaggccactgagttgaaacaccttcaatgcttggaggaggaacttaaaccacttgaggaagccttgaatcttgctccgtccaaaaactttcatttgcggccacgagatctgataagcaacatcaacgtgatcgtcctggaactgaaaggaagcgaaacgacgtttatgtgcgaatatgcagacgaaactgcgacaatcgttgaatttctcaatcgatggatcacttttagccaatctatcatcagcacgttgactggtggtggaggatcgggaggtggaggatctggaggaggaggatcgggtggaggaggatccgaaagtaagtatggccctccttgccctccgtgccctgcacctgagttcctcggcggtccttcagtgtttttgtttccacccaaacctaaagacacccttatgatctctcgaacacctgaagtaacctgtgtagttgttgatgtctcacaggaagatccggaggttcaatttaattggtacgtcgatggtgttgaagtgcataatgcgaagactaagccgagagaggaacagttcaattccacttatcgcgtggtttcagtccttacagtcttgcaccaagattggcttaacggaaaggaatataagtgcaaggtaagtaataaagggcttccatcaagcattgaaaaaaccataagtaaagcaaaaggacaaccgagggagccccaagtctacacgcttcctccttctcaggaggagatgaccaaaaaccaggtaagtttgacgtgtttggtaaaggggttttatccctcagatattgctgtcgaatgggagtctaatggtcagcctgagaacaattacaagactacgccacccgttctggattcagacggatctttcttcctctacagcaaattgacggtagacaaaagccgctggcaagagggcaatgtcttcagttgttctgtaatgcacgaagccctccataatcactacacgcagaaatctctgagcttgtctcttgggaaa

SEQ ID NO: 609 - DNA, 1146 bp, Artificial Sequence
  source: /note="Description of Artificial Sequence: Synthetic polynucleotide"
gcccctacgtcctcctcaactaaaaagacgcaacttcagcttgagaatcttcttctcgaccttcagatgattttgaacggaatcaataattacaaaaatcctaaacttactagaatgctcacgtttaagttttatatgccaaaaaaggccactgagttgaaacaccttcaatgcttggaggaggaacttaaaccacttgaggaagccttgaatcttgctccgtccaaaaactttcatttgcggccacgagatctgataagcaacatcaacgtgatcgtcctggaactgaaaggaagcgaaacgacgtttatgtgcgaatatgcagacgaaactgcgacaatcgttgaatttctcaatcgatggatcacttttagccaatctatcatcagcacgttgactggtggtggaggatcgggaggtggaggatctggaggaggaggatcgggtggaggaggatccgaaagtaagtatggccctccttgccctccgtgccctgcacctgagttcctcggcggtccttcagtgtttttgtttccacccaaacctaaagacacccttatgatctctcgaacacctgaagtaacctgtgtagttgttgatgtctcacaggaagatccggaggttcaatttaattggtacgtcgatggtgttgaagtgcataatgcgaagactaagccgagagaggaacagttcaattccacttatcgcgtggtttcagtccttacagtcttgcaccaagattggcttaacggaaaggaatataagtgcaaggtaagtaataaagggcttccatcaagcattgaaaaaaccataagtaaagcaaaaggacaaccgagggagccccaagtctacacgcttcctccttctcaggaggagatgaccaaaaaccaggtaagtttgacgtgtttggtaaaggggttttatccctcagatattgctgtcgaatgggagtctaatggtcagcctgagaacaattacaagactacgccacccgttctggattcagacggatctttcttcctctacagcaaattgacggtagacaaaagccgctggcaagagggcaatgtcttcagttgttctgtaatgcacgaagccctccataatcactacacgcagaaatctctgagcttgtctcttgggaaa

SEQ ID NO: 610 - DNA, 1146 bp, Artificial Sequence
  source: /note="Description of Artificial Sequence: Synthetic polynucleotide"
gcccctacgtcctcctcaactaaaaagacgcaacttcagcttgagctgcttcttctcgaccttcagatgattttgaacggaatcaataattacaaaaatcctaaacttactagaatgctcacgtttaagttttatatgccaaaaaaggccactgagttgaaacaccttcaatgcttggaggaggaacttaaaccacttgaggaagccttgaatcttgctccgtccaaaaactttcatttgcggccacgagatctgataagcaacatcaacgtgatcgtcctggaactgaaaggaagcgaaacgacgtttatgtgcgaatatgcagacgaaactgcgacaatcgttgaatttctcaatcgatggatcacttttagccaatctatcatcagcacgttgactggtggtggaggatcgggaggtggaggatctggaggaggaggatcgggtggaggaggatccgaaagtaagtatggccctccttgccctccgtgccctgcacctgagttcctcggcggtccttcagtgtttttgtttccacccaaacctaaagacacccttatgatctctcgaacacctgaagtaacctgtgtagttgttgatgtctcacaggaagatccggaggttcaatttaattggtacgtcgatggtgttgaagtgcataatgcgaagactaagccgagagaggaacagttcaattccacttatcgcgtggtttcagtccttacagtcttgcaccaagattggcttaacggaaaggaatataagtgcaaggtaagtaataaagggcttccatcaagcattgaaaaaaccataagtaaagcaaaaggacaaccgagggagccccaagtctacacgcttcctccttctcaggaggagatgaccaaaaaccaggtaagtttgacgtgtttggtaaaggggttttatccctcagatattgctgtcgaatgggagtctaatggtcagcctgagaacaattacaagactacgccacccgttctggattcagacggatctttcttcctctacagcaaattgacggtagacaaaagccgctggcaagagggcaatgtcttcagttgttctgtaatgcacgaagccctccataatcactacacgcagaaatctctgagcttgtctcttgggaaa

SEQ ID NO: 611 - DNA, 1146 bp, Artificial Sequence
  source: /note="Description of Artificial Sequence: Synthetic polynucleotide"
gcccctacgtcctcctcaactaaaaagacgcaacttcagcttgagcatcttcttctcgaccttcagatgattttgaacggaaccaataattacaaaaatcctaaacttactagaatgctcacgtttaagttttatatgccaaaaaaggccactgagttgaaacaccttcaatgcttggaggaggaacttaaaccacttgaggaagccttgaatcttgctccgtccaaaaactttcatttgcggccacgagatctgataagcaacatcaacgtgatcgtcctggaactgaaaggaagcgaaacgacgtttatgtgcgaatatgcagacgaaactgcgacaatcgttgaatttctcaatcgatggatcacttttagccaatctatcatcagcacgttgactggtggtggaggatcgggaggtggaggatctggaggaggaggatcgggtggaggaggatccgaaagtaagtatggccctccttgccctccgtgccctgcacctgagttcctcggcggtccttcagtgtttttgtttccacccaaacctaaagacacccttatgatctctcgaacacctgaagtaacctgtgtagttgttgatgtctcacaggaagatccggaggttcaatttaattggtacgtcgatggtgttgaagtgcataatgcgaagactaagccgagagaggaacagttcaattccacttatcgcgtggtttcagtccttacagtcttgcaccaagattggcttaacggaaaggaatataagtgcaaggtaagtaataaagggcttccatcaagcattgaaaaaaccataagtaaagcaaaaggacaaccgagggagccccaagtctacacgcttcctccttctcaggaggagatgaccaaaaaccaggtaagtttgacgtgtttggtaaaggggttttatccctcagatattgctgtcgaatgggagtctaatggtcagcctgagaacaattacaagactacgccacccgttctggattcagacggatctttcttcctctacagcaaattgacggtagacaaaagccgctggcaagagggcaatgtcttcagttgttctgtaatgcacgaagccctccataatcactacacgcagaaatctctgagcttgtctcttgggaaa

SEQ ID NO: 612 - DNA, 1146 bp, Artificial Sequence
  source: /note="Description of Artificial Sequence: Synthetic polynucleotide"
gcccctacgtcctcctcaactaaaaagacgcaacttcagcttgagcatcttcttctcgaccttcagatgattttgaacggaatcaataattacaaaaatcctaaacttactagaatgctcacgtttaagttttatatgccaaaaaaggccactgagttgaaacaccttcaatgcttggaggaggaacttaaaccacttgaggaagccttgaatcttgctccgtccaaaaactttcatttgcggccacgagttctgataagcaacatcaacgtgatcgtcctggaactgaaaggaagcgaaacgacgtttatgtgcgaatatgcagacgaaactgcgacaatcgttgaatttctcaatcgatggatcacttttagccaatctatcatcagcacgttgactggtggtggaggatcgggaggtggaggatctggaggaggaggatcgggtggaggaggatccgaaagtaagtatggccctccttgccctccgtgccctgcacctgagttcctcggcggtccttcagtgtttttgtttccacccaaacctaaagacacccttatgatctctcgaacacctgaagtaacctgtgtagttgttgatgtctcacaggaagatccggaggttcaatttaattggtacgtcgatggtgttgaagtgcataatgcgaagactaagccgagagaggaacagttcaattccacttatcgcgtggtttcagtccttacagtcttgcaccaagattggcttaacggaaaggaatataagtgcaaggtaagtaataaagggcttccatcaagcattgaaaaaaccataagtaaagcaaaaggacaaccgagggagccccaagtctacacgcttcctccttctcaggaggagatgaccaaaaaccaggtaagtttgacgtgtttggtaaaggggttttatccctcagatattgctgtcgaatgggagtctaatggtcagcctgagaacaattacaagactacgccacccgttctggattcagacggatctttcttcctctacagcaaattgacggtagacaaaagccgctggcaagagggcaatgtcttcagttgttctgtaatgcacgaagccctccataatcactacacgcagaaatctctgagcttgtctcttgggaaa

SEQ ID NO: 613 - DNA, 1146 bp, Artificial Sequence
  source: /note="Description of Artificial Sequence: Synthetic polynucleotide"
gcccctacgtcctcctcaactaaaaagacgcaacttcagcttgagcatcttcttctcgaccttcagatgattttgaacggaatcaataattacaaaaatcctaaacttactagaatgctcacgtttaagttttatatgccaaaaaaggccactgagttgaaacaccttcaatgcttggaggaggaacttaaaccacttgaggaagccttgaatcttgctccgtccaaaaactttcatttgcggccacgagatctgatacgtaacatcaacgtgatcgtcctggaactgaaaggaagcgaaacgacgtttatgtgcgaatatgcagacgaaactgcgacaatcgttgaatttctcaatcgatggatcacttttagccaatctatcatcagcacgttgactggtggtggaggatcgggaggtggaggatctggaggaggaggatcgggtggaggaggatccgaaagtaagtatggccctccttgccctccgtgccctgcacctgagttcctcggcggtccttcagtgtttttgtttccacccaaacctaaagacacccttatgatctctcgaacacctgaagtaacctgtgtagttgttgatgtctcacaggaagatccggaggttcaatttaattggtacgtcgatggtgttgaagtgcataatgcgaagactaagccgagagaggaacagttcaattccacttatcgcgtggtttcagtccttacagtcttgcaccaagattggcttaacggaaaggaatataagtgcaaggtaagtaataaagggcttccatcaagcattgaaaaaaccataagtaaagcaaaaggacaaccgagggagccccaagtctacacgcttcctccttctcaggaggagatgaccaaaaaccaggtaagtttgacgtgtttggtaaaggggttttatccctcagatattgctgtcgaatgggagtctaatggtcagcctgagaacaattacaagactacgccacccgttctggattcagacggatctttcttcctctacagcaaattgacggtagacaaaagccgctggcaagagggcaatgtcttcagttgttctgtaatgcacgaagccctccataatcactacacgcagaaatctctgagcttgtctcttgggaaa

SEQ ID NO: 614 - DNA, 1146 bp, Artificial Sequence
  source: /note="Description of Artificial Sequence: Synthetic polynucleotide"
gcccctacgtcctcctcaactaaaaagacgcaacttcagcttgagcatcttcttctcgaccttcagatgattttgaacggaatcaataattacaaaaatcctaaacttactagaatgctcacgtttaagttttatatgccaaaaaaggccactgagttgaaacaccttcaatgcttggaggaggaacttaaaccacttgaggaagccttgaatcttgctccgtccaaaaactttcatttgcggccacgagatctgataagcctgatcaacgtgatcgtcctggaactgaaaggaagcgaaacgacgtttatgtgcgaatatgcagacgaaactgcgacaatcgttgaatttctcaatcgatggatcacttttagccaatctatcatcagcacgttgactggtggtggaggatcgggaggtggaggatctggaggaggaggatcgggtggaggaggatccgaaagtaagtatggccctccttgccctccgtgccctgcacctgagttcctcggcggtccttcagtgtttttgtttccacccaaacctaaagacacccttatgatctctcgaacacctgaagtaacctgtgtagttgttgatgtctcacaggaagatccggaggttcaatttaattggtacgtcgatggtgttgaagtgcataatgcgaagactaagccgagagaggaacagttcaattccacttatcgcgtggtttcagtccttacagtcttgcaccaagattggcttaacggaaaggaatataagtgcaaggtaagtaataaagggcttccatcaagcattgaaaaaaccataagtaaagcaaaaggacaaccgagggagccccaagtctacacgcttcctccttctcaggaggagatgaccaaaaaccaggtaagtttgacgtgtttggtaaaggggttttatccctcagatattgctgtcgaatgggagtctaatggtcagcctgagaacaattacaagactacgccacccgttctggattcagacggatctttcttcctctacagcaaattgacggtagacaaaagccgctggcaagagggcaatgtcttcagttgttctgtaatgcacgaagccctccataatcactacacgcagaaatctctgagcttgtctcttgggaaa

SEQ ID NO: 615 - DNA, 1146 bp, Artificial Sequence
  source: /note="Description of Artificial Sequence: Synthetic polynucleotide"
gcccctacgtcctcctcaactaaaaagacgcaacttcagcttgagcatcttcttctcgaccttcagatgattttgaacggaatcaataattacaaaaatcctaaacttactagaatgctcacgtttaagttttatatgccaaaaaaggccactgagttgaaacaccttcaatgcttggaggaggaacttaaaccacttgaggaagccttgaatcttgctccgtccaaaaactttcatttgcggccacgagatctgataagcagcatcaacgtgatcgtcctggaactgaaaggaagcgaaacgacgtttatgtgcgaatatgcagacgaaactgcgacaatcgttgaatttctcaatcgatggatcacttttagccaatctatcatcagcacgttgactggtggtggaggatcgggaggtggaggatctggaggaggaggatcgggtggaggaggatccgaaagtaagtatggccctccttgccctccgtgccctgcacctgagttcctcggcggtccttcagtgtttttgtttccacccaaacctaaagacacccttatgatctctcgaacacctgaagtaacctgtgtagttgttgatgtctcacaggaagatccggaggttcaatttaattggtacgtcgatggtgttgaagtgcataatgcgaagactaagccgagagaggaacagttcaattccacttatcgcgtggtttcagtccttacagtcttgcaccaagattggcttaacggaaaggaatataagtgcaaggtaagtaataaagggcttccatcaagcattgaaaaaaccataagtaaagcaaaaggacaaccgagggagccccaagtctacacgcttcctccttctcaggaggagatgaccaaaaaccaggtaagtttgacgtgtttggtaaaggggttttatccctcagatattgctgtcgaatgggagtctaatggtcagcctgagaacaattacaagactacgccacccgttctggattcagacggatctttcttcctctacagcaaattgacggtagacaaaagccgctggcaagagggcaatgtcttcagttgttctgtaatgcacgaagccctccataatcactacacgcagaaatctctgagcttgtctcttgggaaa

SEQ ID NO: 616 - DNA, 1146 bp, Artificial Sequence
  source: /note="Description of Artificial Sequence: Synthetic polynucleotide"
gcccctacgtcctcctcaactaaaaagacgcaacttcagcttgagcatcttcttctcgaccttcagatgattttgaacggaatcaataattacaaaaatcctaaacttactagaatgctcacgtttaagttttatatgccaaaaaaggccactgagttgaaacaccttcaatgcttggaggaggaacttaaaccacttgaggaagccttgaatcttgctccgtccaaaaactttcatttgcggccacgagatctgataagcaacatcaacgtgagcgtcctggaactgaaaggaagcgaaacgacgtttatgtgcgaatatgcagacgaaactgcgacaatcgttgaatttctcaatcgatggatcacttttagccaatctatcatcagcacgttgactggtggtggaggatcgggaggtggaggatctggaggaggaggatcgggtggaggaggatccgaaagtaagtatggccctccttgccctccgtgccctgcacctgagttcctcggcggtccttcagtgtttttgtttccacccaaacctaaagacacccttatgatctctcgaacacctgaagtaacctgtgtagttgttgatgtctcacaggaagatccggaggttcaatttaattggtacgtcgatggtgttgaagtgcataatgcgaagactaagccgagagaggaacagttcaattccacttatcgcgtggtttcagtccttacagtcttgcaccaagattggcttaacggaaaggaatataagtgcaaggtaagtaataaagggcttccatcaagcattgaaaaaaccataagtaaagcaaaaggacaaccgagggagccccaagtctacacgcttcctccttctcaggaggagatgaccaaaaaccaggtaagtttgacgtgtttggtaaaggggttttatccctcagatattgctgtcgaatgggagtctaatggtcagcctgagaacaattacaagactacgccacccgttctggattcagacggatctttcttcctctacagcaaattgacggtagacaaaagccgctggcaagagggcaatgtcttcagttgttctgtaatgcacgaagccctccataatcactacacgcagaaatctctgagcttgtctcttgggaaa

SEQ ID NO: 617 - DNA, 1146 bp, Artificial Sequence
  source: /note="Description of Artificial Sequence: Synthetic polynucleotide"
gcccctacgtcctcctcaactaaaaagacgcaacttcagcttgagcatcttcttctcgaccttcagatgattttgaacggaatcaataattacaaaaatcctgaacttactagaatgctcacgtttaagttttatatgccaaaaaaggccactgagttgaaacaccttcaatgcttggaggaggaacttaaaccacttgaggaagccttgaatcttgctccgtccaaaaactttcatttgcggccacgagatctgataagcaacatcaacgtgatcgtcctggaactgaaaggaagcgaaacgacgtttatgtgcgaatatgcagacgaaactgcgacaatcgttgaatttctcaatcgatggatcacttttagccaatctatcatcagcacgttgactggtggtggaggatcgggaggtggaggatctggaggaggaggatcgggtggaggaggatccgaaagtaagtatggccctccttgccctccgtgccctgcacctgagttcctcggcggtccttcagtgtttttgtttccacccaaacctaaagacacccttatgatctctcgaacacctgaagtaacctgtgtagttgttgatgtctcacaggaagatccggaggttcaatttaattggtacgtcgatggtgttgaagtgcataatgcgaagactaagccgagagaggaacagttcaattccacttatcgcgtggtttcagtccttacagtcttgcaccaagattggcttaacggaaaggaatataagtgcaaggtaagtaataaagggcttccatcaagcattgaaaaaaccataagtaaagcaaaaggacaaccgagggagccccaagtctacacgcttcctccttctcaggaggagatgaccaaaaaccaggtaagtttgacgtgtttggtaaaggggttttatccctcagatattgctgtcgaatgggagtctaatggtcagcctgagaacaattacaagactacgccacccgttctggattcagacggatctttcttcctctacagcaaattgacggtagacaaaagccgctggcaagagggcaatgtcttcagttgttctgtaatgcacgaagccctccataatcactacacgcagaaatctctgagcttgtctcttgggaaa

SEQ ID NO: 618 - DNA, 1146 bp, Artificial Sequence
  source: /note="Description of Artificial Sequence: Synthetic polynucleotide"
gcccctacgtcctcctcaactaaaaagacgcaacttcagcttgagaaccttcttctcgaccttcagatgattttgaacggaatcaataattacaaaaatcctgaacttactagaatgctcacgtttaagttttatatgccaaaaaaggccactgagttgaaacaccttcaatgcttggaggaggaacttaaaccacttgaggaagccttgaatcttgctccgtccaaaaactttcatttgcggccacgagatctgataagcaacatcaacgtgatcgtcctggaactgaaaggaagcgaaacgacgtttatgtgcgaatatgcagacgaaactgcgacaatcgttgaatttctcaatcgatggatcacttttagccaatctatcatcagcacgttgactggtggtggaggatcgggaggtggaggatctggaggaggaggatcgggtggaggaggatccgaaagtaagtatggccctccttgccctccgtgccctgcacctgagttcctcggcggtccttcagtgtttttgtttccacccaaacctaaagacacccttatgatctctcgaacacctgaagtaacctgtgtagttgttgatgtctcacaggaagatccggaggttcaatttaattggtacgtcgatggtgttgaagtgcataatgcgaagactaagccgagagaggaacagttcaattccacttatcgcgtggtttcagtccttacagtcttgcaccaagattggcttaacggaaaggaatataagtgcaaggtaagtaataaagggcttccatcaagcattgaaaaaaccataagtaaagcaaaaggacaaccgagggagccccaagtctacacgcttcctccttctcaggaggagatgaccaaaaaccaggtaagtttgacgtgtttggtaaaggggttttatccctcagatattgctgtcgaatgggagtctaatggtcagcctgagaacaattacaagactacgccacccgttctggattcagacggatctttcttcctctacagcaaattgacggtagacaaaagccgctggcaagagggcaatgtcttcagttgttctgtaatgcacgaagccctccataatcactacacgcagaaatctctgagcttgtctcttgggaaa

SEQ ID NO: 619 - DNA, 1146 bp, Artificial Sequence
  source: /note="Description of Artificial Sequence: Synthetic polynucleotide"
gcccctacgtcctcctcaactaaaaagacgcaacttcagcttgagctgcttcttctcgaccttcagatgattttgaacggaatcaataattacaaaaatcctgaacttactagaatgctcacgtttaagttttatatgccaaaaaaggccactgagttgaaacaccttcaatgcttggaggaggaacttaaaccacttgaggaagccttgaatcttgctccgtccaaaaactttcatttgcggccacgagatctgataagcaacatcaacgtgatcgtcctggaactgaaaggaagcgaaacgacgtttatgtgcgaatatgcagacgaaactgcgacaatcgttgaatttctcaatcgatggatcacttttagccaatctatcatcagcacgttgactggtggtggaggatcgggaggtggaggatctggaggaggaggatcgggtggaggaggatccgaaagtaagtatggccctccttgccctccgtgccctgcacctgagttcctcggcggtccttcagtgtttttgtttccacccaaacctaaagacacccttatgatctctcgaacacctgaagtaacctgtgtagttgttgatgtctcacaggaagatccggaggttcaatttaattggtacgtcgatggtgttgaagtgcataatgcgaagactaagccgagagaggaacagttcaattccacttatcgcgtggtttcagtccttacagtcttgcaccaagattggcttaacggaaaggaatataagtgcaaggtaagtaataaagggcttccatcaagcattgaaaaaaccataagtaaagcaaaaggacaaccgagggagccccaagtctacacgcttcctccttctcaggaggagatgaccaaaaaccaggtaagtttgacgtgtttggtaaaggggttttatccctcagatattgctgtcgaatgggagtctaatggtcagcctgagaacaattacaagactacgccacccgttctggattcagacggatctttcttcctctacagcaaattgacggtagacaaaagccgctggcaagagggcaatgtcttcagttgttctgtaatgcacgaagccctccataatcactacacgcagaaatctctgagcttgtctcttgggaaa

SEQ ID NO: 620 - DNA, 1146 bp, Artificial Sequence
  source: /note="Description of Artificial Sequence: Synthetic polynucleotide"
gcccctacgtcctcctcaactaaaaagacgcaacttcagcttgagcatcttcttctcgaccttcagatgattttgaacggaatcaataattacaaaaatcctgaacttactagaatgctcacgtttaagttttatatgccaaaaaaggccactgagttgaaacaccttcaatgcttggaggaggaacttaaaccacttgaggaagccttgaatcttgctccgtccaaaaactttcatttgcggccacgagtgctgataagcaacatcaacgtgatcgtcctggaactgaaaggaagcgaaacgacgtttatgtgcgaatatgcagacgaaactgcgacaatcgttgaatttctcaatcgatggatcacttttagccaatctatcatcagcacgttgactggtggtggaggatcgggaggtggaggatctggaggaggaggatcgggtggaggaggatccgaaagtaagtatggccctccttgccctccgtgccctgcacctgagttcctcggcggtccttcagtgtttttgtttccacccaaacctaaagacacccttatgatctctcgaacacctgaagtaacctgtgtagttgttgatgtctcacaggaagatccggaggttcaatttaattggtacgtcgatggtgttgaagtgcataatgcgaagactaagccgagagaggaacagttcaattccacttatcgcgtggtttcagtccttacagtcttgcaccaagattggcttaacggaaaggaatataagtgcaaggtaagtaataaagggcttccatcaagcattgaaaaaaccataagtaaagcaaaaggacaaccgagggagccccaagtctacacgcttcctccttctcaggaggagatgaccaaaaaccaggtaagtttgacgtgtttggtaaaggggttttatccctcagatattgctgtcgaatgggagtctaatggtcagcctgagaacaattacaagactacgccacccgttctggattcagacggatctttcttcctctacagcaaattgacggtagacaaaagccgctggcaagagggcaatgtcttcagttgttctgtaatgcacgaagccctccataatcactacacgcagaaatctctgagcttgtctcttgggaaa

SEQ ID NO: 621 - DNA, 1146 bp, Artificial Sequence
  source: /note="Description of Artificial Sequence: Synthetic polynucleotide"
gcccctacgtcctcctcaactaaaaagacgcaacttcagcttgagcatcttcttctcgaccttcagatgattttgaacggaatcaataattacaaaaatcctgaacttactagaatgctcacgtttaagttttatatgccaaaaaaggccactgagttgaaacaccttcaatgcttggaggaggaacttaaaccacttgaggaagccttgaatcttgctccgtccaaaaactttcatttgcggccacgagatctgataagcaacatcaacgtgagcgtcctggaactgaaaggaagcgaaacgacgtttatgtgcgaatatgcagacgaaactgcgacaatcgttgaatttctcaatcgatggatcacttttagccaatctatcatcagcacgttgactggtggtggaggatcgggaggtggaggatctggaggaggaggatcgggtggaggaggatccgaaagtaagtatggccctccttgccctccgtgccctgcacctgagttcctcggcggtccttcagtgtttttgtttccacccaaacctaaagacacccttatgatctctcgaacacctgaagtaacctgtgtagttgttgatgtctcacaggaagatccggaggttcaatttaattggtacgtcgatggtgttgaagtgcataatgcgaagactaagccgagagaggaacagttcaattccacttatcgcgtggtttcagtccttacagtcttgcaccaagattggcttaacggaaaggaatataagtgcaaggtaagtaataaagggcttccatcaagcattgaaaaaaccataagtaaagcaaaaggacaaccgagggagccccaagtctacacgcttcctccttctcaggaggagatgaccaaaaaccaggtaagtttgacgtgtttggtaaaggggttttatccctcagatattgctgtcgaatgggagtctaatggtcagcctgagaacaattacaagactacgccacccgttctggattcagacggatctttcttcctctacagcaaattgacggtagacaaaagccgctggcaagagggcaatgtcttcagttgttctgtaatgcacgaagccctccataatcactacacgcagaaatctctgagcttgtctcttgggaaa

SEQ ID NO: 622 - DNA, 1146 bp, Artificial Sequence
  source: /note="Description of Artificial Sequence: Synthetic polynucleotide"
gcccctacgtcctcctcaactaaaaagacgcaacttcagcttgagcatcttcttctcgaccttcagatgattttgaacggaatcaataattacaaaaatcctaaacttactcagatgctcacgtttaagttttatatgccaaaaaaggccactgagttgaaacaccttcaatgcttggaggaggaacttaaaccacttgaggaagccttgaatcttgctccgtccaaaaactttcatttgcggccacgagatctgataagcaacatcaacgtgatcgtcctggaactgaaaggaagcgaaacgacgtttatgtgcgaatatgcagacgaaactgcgacaatcgttgaatttctcaatcgatggatcacttttagccaatctatcatcagcacgttgactggtggtggaggatcgggaggtggaggatctggaggaggaggatcgggtggaggaggatccgaaagtaagtatggccctccttgccctccgtgccctgcacctgagttcctcggcggtccttcagtgtttttgtttccacccaaacctaaagacacccttatgatctctcgaacacctgaagtaacctgtgtagttgttgatgtctcacaggaagatccggaggttcaatttaattggtacgtcgatggtgttgaagtgcataatgcgaagactaagccgagagaggaacagttcaattccacttatcgcgtggtttcagtccttacagtcttgcaccaagattggcttaacggaaaggaatataagtgcaaggtaagtaataaagggcttccatcaagcattgaaaaaaccataagtaaagcaaaaggacaaccgagggagccccaagtctacacgcttcctccttctcaggaggagatgaccaaaaaccaggtaagtttgacgtgtttggtaaaggggttttatccctcagatattgctgtcgaatgggagtctaatggtcagcctgagaacaattacaagactacgccacccgttctggattcagacggatctttcttcctctacagcaaattgacggtagacaaaagccgctggcaagagggcaatgtcttcagttgttctgtaatgcacgaagccctccataatcactacacgcagaaatctctgagcttgtctcttgggaaa

SEQ ID NO: 623 - DNA, 1146 bp, Artificial Sequence
  source: /note="Description of Artificial Sequence: Synthetic polynucleotide"
gcccctacgtcctcctcaactaaaaagacgcaacttcagcttgagaaccttcttctcgaccttcagatgattttgaacggaatcaataattacaaaaatcctaaacttactcagatgctcacgtttaagttttatatgccaaaaaaggccactgagttgaaacaccttcaatgcttggaggaggaacttaaaccacttgaggaagccttgaatcttgctccgtccaaaaactttcatttgcggccacgagatctgataagcaacatcaacgtgatcgtcctggaactgaaaggaagcgaaacgacgtttatgtgcgaatatgcagacgaaactgcgacaatcgttgaatttctcaatcgatggatcacttttagccaatctatcatcagcacgttgactggtggtggaggatcgggaggtggaggatctggaggaggaggatcgggtggaggaggatccgaaagtaagtatggccctccttgccctccgtgccctgcacctgagttcctcggcggtccttcagtgtttttgtttccacccaaacctaaagacacccttatgatctctcgaacacctgaagtaacctgtgtagttgttgatgtctcacaggaagatccggaggttcaatttaattggtacgtcgatggtgttgaagtgcataatgcgaagactaagccgagagaggaacagttcaattccacttatcgcgtggtttcagtccttacagtcttgcaccaagattggcttaacggaaaggaatataagtgcaaggtaagtaataaagggcttccatcaagcattgaaaaaaccataagtaaagcaaaaggacaaccgagggagccccaagtctacacgcttcctccttctcaggaggagatgaccaaaaaccaggtaagtttgacgtgtttggtaaaggggttttatccctcagatattgctgtcgaatgggagtctaatggtcagcctgagaacaattacaagactacgccacccgttctggattcagacggatctttcttcctctacagcaaattgacggtagacaaaagccgctggcaagagggcaatgtcttcagttgttctgtaatgcacgaagccctccataatcactacacgcagaaatctctgagcttgtctcttgggaaa

SEQ ID NO: 624 - DNA, 1146 bp, Artificial Sequence
  source: /note="Description of Artificial Sequence: Synthetic polynucleotide"
gcccctacgtcctcctcaactaaaaagacgcaacttcagcttgagctgcttcttctcgaccttcagatgattttgaacggaatcaataattacaaaaatcctaaacttactcagatgctcacgtttaagttttatatgccaaaaaaggccactgagttgaaacaccttcaatgcttggaggaggaacttaaaccacttgaggaagccttgaatcttgctccgtccaaaaactttcatttgcggccacgagatctgataagcaacatcaacgtgatcgtcctggaactgaaaggaagcgaaacgacgtttatgtgcgaatatgcagacgaaactgcgacaatcgttgaatttctcaatcgatggatcacttttagccaatctatcatcagcacgttgactggtggtggaggatcgggaggtggaggatctggaggaggaggatcgggtggaggaggatccgaaagtaagtatggccctccttgccctccgtgccctgcacctgagttcctcggcggtccttcagtgtttttgtttccacccaaacctaaagacacccttatgatctctcgaacacctgaagtaacctgtgtagttgttgatgtctcacaggaagatccggaggttcaatttaattggtacgtcgatggtgttgaagtgcataatgcgaagactaagccgagagaggaacagttcaattccacttatcgcgtggtttcagtccttacagtcttgcaccaagattggcttaacggaaaggaatataagtgcaaggtaagtaataaagggcttccatcaagcattgaaaaaaccataagtaaagcaaaaggacaaccgagggagccccaagtctacacgcttcctccttctcaggaggagatgaccaaaaaccaggtaagtttgacgtgtttggtaaaggggttttatccctcagatattgctgtcgaatgggagtctaatggtcagcctgagaacaattacaagactacgccacccgttctggattcagacggatctttcttcctctacagcaaattgacggtagacaaaagccgctggcaagagggcaatgtcttcagttgttctgtaatgcacgaagccctccataatcactacacgcagaaatctctgagcttgtctcttgggaaa

SEQ ID NO: 625 - DNA, 1146 bp, Artificial Sequence
  source: /note="Description of Artificial Sequence: Synthetic polynucleotide"
gcccctacgtcctcctcaactaaaaagacgcaacttcagcttgagcatcttcttctcgaccttcagatgattttgaacggaatcaataattacaaaaatcctaaacttactcagatgctcacgtttaagttttatatgccaaaaaaggccactgagttgaaacaccttcaatgcttggaggaggaacttaaaccacttgaggaagccttgaatcttgctccgtccaaaaactttcatttgcggccacgagtgctgataagcaacatcaacgtgatcgtcctggaactgaaaggaagcgaaacgacgtttatgtgcgaatatgcagacgaaactgcgacaatcgttgaatttctcaatcgatggatcacttttagccaatctatcatcagcacgttgactggtggtggaggatcgggaggtggaggatctggaggaggaggatcgggtggaggaggatccgaaagtaagtatggccctccttgccctccgtgccctgcacctgagttcctcggcggtccttcagtgtttttgtttccacccaaacctaaagacacccttatgatctctcgaacacctgaagtaacctgtgtagttgttgatgtctcacaggaagatccggaggttcaatttaattggtacgtcgatggtgttgaagtgcataatgcgaagactaagccgagagaggaacagttcaattccacttatcgcgtggtttcagtccttacagtcttgcaccaagattggcttaacggaaaggaatataagtgcaaggtaagtaataaagggcttccatcaagcattgaaaaaaccataagtaaagcaaaaggacaaccgagggagccccaagtctacacgcttcctccttctcaggaggagatgaccaaaaaccaggtaagtttgacgtgtttggtaaaggggttttatccctcagatattgctgtcgaatgggagtctaatggtcagcctgagaacaattacaagactacgccacccgttctggattcagacggatctttcttcctctacagcaaattgacggtagacaaaagccgctggcaagagggcaatgtcttcagttgttctgtaatgcacgaagccctccataatcactacacgcagaaatctctgagcttgtctcttgggaaa

SEQ ID NO: 626 - DNA, 1146 bp, Artificial Sequence
  source: /note="Description of Artificial Sequence: Synthetic polynucleotide"
gcccctacgtcctcctcaactaaaaagacgcaacttcagcttgagcatcttcttctcgaccttcagatgattttgaacggaatcaataattacaaaaatcctaaacttactcagatgctcacgtttaagttttatatgccaaaaaaggccactgagttgaaacaccttcaatgcttggaggaggaacttaaaccacttgaggaagccttgaatcttgctccgtccaaaaactttcatttgcggccacgagatctgataagcaacatcaacgtgagcgtcctggaactgaaaggaagcgaaacgacgtttatgtgcgaatatgcagacgaaactgcgacaatcgttgaatttctcaatcgatggatcacttttagccaatctatcatcagcacgttgactggtggtggaggatcgggaggtggaggatctggaggaggaggatcgggtggaggaggatccgaaagtaagtatggccctccttgccctccgtgccctgcacctgagttcctcggcggtccttcagtgtttttgtttccacccaaacctaaagacacccttatgatctctcgaacacctgaagtaacctgtgtagttgttgatgtctcacaggaagatccggaggttcaatttaattggtacgtcgatggtgttgaagtgcataatgcgaagactaagccgagagaggaacagttcaattccacttatcgcgtggtttcagtccttacagtcttgcaccaagattggcttaacggaaaggaatataagtgcaaggtaagtaataaagggcttccatcaagcattgaaaaaaccataagtaaagcaaaaggacaaccgagggagccccaagtctacacgcttcctccttctcaggaggagatgaccaaaaaccaggtaagtttgacgtgtttggtaaaggggttttatccctcagatattgctgtcgaatgggagtctaatggtcagcctgagaacaattacaagactacgccacccgttctggattcagacggatctttcttcctctacagcaaattgacggtagacaaaagccgctggcaagagggcaatgtcttcagttgttctgtaatgcacgaagccctccataatcactacacgcagaaatctctgagcttgtctcttgggaaa

SEQ ID NO: 627 - DNA, 1146 bp, Artificial Sequence
  source: /note="Description of Artificial Sequence: Synthetic polynucleotide"
gcccctacgtcctcctcaactaaaaagacgcaacttcagcttgagcatcttcttctcgaccttcagatgattttgaacggaatcaataattacaaaaatcctaaacttactaacatgctcacgtttaagttttatatgccaaaaaaggccactgagttgaaacaccttcaatgcttggaggaggaacttaaaccacttgaggaagccttgaatcttgctccgtccaaaaactttcatttgcggccacgagatctgataagcaacatcaacgtgatcgtcctggaactgaaaggaagcgaaacgacgtttatgtgcgaatatgcagacgaaactgcgacaatcgttgaatttctcaatcgatggatcacttttagccaatctatcatcagcacgttgactggtggtggaggatcgggaggtggaggatctggaggaggaggatcgggtggaggaggatccgaaagtaagtatggccctccttgccctccgtgccctgcacctgagttcctcggcggtccttcagtgtttttgtttccacccaaacctaaagacacccttatgatctctcgaacacctgaagtaacctgtgtagttgttgatgtctcacaggaagatccggaggttcaatttaattggtacgtcgatggtgttgaagtgcataatgcgaagactaagccgagagaggaacagttcaattccacttatcgcgtggtttcagtccttacagtcttgcaccaagattggcttaacggaaaggaatataagtgcaaggtaagtaataaagggcttccatcaagcattgaaaaaaccataagtaaagcaaaaggacaaccgagggagccccaagtctacacgcttcctccttctcaggaggagatgaccaaaaaccaggtaagtttgacgtgtttggtaaaggggttttatccctcagatattgctgtcgaatgggagtctaatggtcagcctgagaacaattacaagactacgccacccgttctggattcagacggatctttcttcctctacagcaaattgacggtagacaaaagccgctggcaagagggcaatgtcttcagttgttctgtaatgcacgaagccctccataatcactacacgcagaaatctctgagcttgtctcttgggaaa

SEQ ID NO: 628 - DNA, 1146 bp, Artificial Sequence
  source: /note="Description of Artificial Sequence: Synthetic polynucleotide"
gcccctacgtcctcctcaactaaaaagacgcaacttcagcttgagaaccttcttctcgaccttcagatgattttgaacggaatcaataattacaaaaatcctaaacttactaacatgctcacgtttaagttttatatgccaaaaaaggccactgagttgaaacaccttcaatgcttggaggaggaacttaaaccacttgaggaagccttgaatcttgctccgtccaaaaactttcatttgcggccacgagatctgataagcaacatcaacgtgatcgtcctggaactgaaaggaagcgaaacgacgtttatgtgcgaatatgcagacgaaactgcgacaatcgttgaatttctcaatcgatggatcacttttagccaatctatcatcagcacgttgactggtggtggaggatcgggaggtggaggatctggaggaggaggatcgggtggaggaggatccgaaagtaagtatggccctccttgccctccgtgccctgcacctgagttcctcggcggtccttcagtgtttttgtttccacccaaacctaaagacacccttatgatctctcgaacacctgaagtaacctgtgtagttgttgatgtctcacaggaagatccggaggttcaatttaattggtacgtcgatggtgttgaagtgcataatgcgaagactaagccgagagaggaacagttcaattccacttatcgcgtggtttcagtccttacagtcttgcaccaagattggcttaacggaaaggaatataagtgcaaggtaagtaataaagggcttccatcaagcattgaaaaaaccataagtaaagcaaaaggacaaccgagggagccccaagtctacacgcttcctccttctcaggaggagatgaccaaaaaccaggtaagtttgacgtgtttggtaaaggggttttatccctcagatattgctgtcgaatgggagtctaatggtcagcctgagaacaattacaagactacgccacccgttctggattcagacggatctttcttcctctacagcaaattgacggtagacaaaagccgctggcaagagggcaatgtcttcagttgttctgtaatgcacgaagccctccataatcactacacgcagaaatctctgagcttgtctcttgggaaa

SEQ ID NO: 629 - DNA, 1146 bp, Artificial Sequence
  source: /note="Description of Artificial Sequence: Synthetic polynucleotide"
gcccctacgtcctcctcaactaaaaagacgcaacttcagcttgagttgcttcttctcgaccttcagatgattttgaacggaatcaataattacaaaaatcctaaacttactaacatgctcacgtttaagttttatatgccaaaaaaggccactgagttgaaacaccttcaatgcttggaggaggaacttaaaccacttgaggaagccttgaatcttgctccgtccaaaaactttcatttgcggccacgagatctgataagcaacatcaacgtgatcgtcctggaactgaaaggaagcgaaacgacgtttatgtgcgaatatgcagacgaaactgcgacaatcgttgaatttctcaatcgatggatcacttttagccaatctatcatcagcacgttgactggtggtggaggatcgggaggtggaggatctggaggaggaggatcgggtggaggaggatccgaaagtaagtatggccctccttgccctccgtgccctgcacctgagttcctcggcggtccttcagtgtttttgtttccacccaaacctaaagacacccttatgatctctcgaacacctgaagtaacctgtgtagttgttgatgtctcacaggaagatccggaggttcaatttaattggtacgtcgatggtgttgaagtgcataatgcgaagactaagccgagagaggaacagttcaattccacttatcgcgtggtttcagtccttacagtcttgcaccaagattggcttaacggaaaggaatataagtgcaaggtaagtaataaagggcttccatcaagcattgaaaaaaccataagtaaagcaaaaggacaaccgagggagccccaagtctacacgcttcctccttctcaggaggagatgaccaaaaaccaggtaagtttgacgtgtttggtaaaggggttttatccctcagatattgctgtcgaatgggagtctaatggtcagcctgagaacaattacaagactacgccacccgttctggattcagacggatctttcttcctctacagcaaattgacggtagacaaaagccgctggcaagagggcaatgtcttcagttgttctgtaatgcacgaagccctccataatcactacacgcagaaatctctgagcttgtctcttgggaaa

SEQ ID NO: 630 - DNA, 1146 bp, Artificial Sequence
  source: /note="Description of Artificial Sequence: Synthetic polynucleotide"
gcccctacgtcctcctcaactaaaaagacgcaacttcagcttgagcatcttcttctcgaccttcagatgattttgaacggaatcaataattacaaaaatcctaaacttactaacatgctcacgtttaagttttatatgccaaaaaaggccactgagttgaaacaccttcaatgcttggaggaggaacttaaaccacttgaggaagccttgaatcttgctccgtccaaaaactttcatttgcggccacgagtcctgataagcaacatcaacgtgatcgtcctggaactgaaaggaagcgaaacgacgtttatgtgcgaatatgcagacgaaactgcgacaatcgttgaatttctcaatcgatggatcacttttagccaatctatcatcagcacgttgactggtggtggaggatcgggaggtggaggatctggaggaggaggatcgggtggaggaggatccgaaagtaagtatggccctccttgccctccgtgccctgcacctgagttcctcggcggtccttcagtgtttttgtttccacccaaacctaaagacacccttatgatctctcgaacacctgaagtaacctgtgtagttgttgatgtctcacaggaagatccggaggttcaatttaattggtacgtcgatggtgttgaagtgcataatgcgaagactaagccgagagaggaacagttcaattccacttatcgcgtggtttcagtccttacagtcttgcaccaagattggcttaacggaaaggaatataagtgcaaggtaagtaataaagggcttccatcaagcattgaaaaaaccataagtaaagcaaaaggacaaccgagggagccccaagtctacacgcttcctccttctcaggaggagatgaccaaaaaccaggtaagtttgacgtgtttggtaaaggggttttatccctcagatattgctgtcgaatgggagtctaatggtcagcctgagaacaattacaagactacgccacccgttctggattcagacggatctttcttcctctacagcaaattgacggtagacaaaagccgctggcaagagggcaatgtcttcagttgttctgtaatgcacgaagccctccataatcactacacgcagaaatctctgagcttgtctcttgggaaa

SEQ ID NO: 631 - DNA, 1146 bp, Artificial Sequence
  source: /note="Description of Artificial Sequence: Synthetic polynucleotide"
gcccctacgtcctcctcaactaaaaagacgcaacttcagcttgagcatcttcttctcgaccttcagatgattttgaacggaatcaataattacaaaaatcctaaacttactaacatgctcacgtttaagttttatatgccaaaaaaggccactgagttgaaacaccttcaatgcttggaggaggaacttaaaccacttgaggaagccttgaatcttgctccgtccaaaaactttcatttgcggccacgagatctgataagcaacatcaacgtgagcgtcctggaactgaaaggaagcgaaacgacgtttatgtgcgaatatgcagacgaaactgcgacaatcgttgaatttctcaatcgatggatcacttttagccaatctatcatcagcacgttgactggtggtggaggatcgggaggtggaggatctggaggaggaggatcgggtggaggaggatccgaaagtaagtatggccctccttgccctccgtgccctgcacctgagttcctcggcggtccttcagtgtttttgtttccacccaaacctaaagacacccttatgatctctcgaacacctgaagtaacctgtgtagttgttgatgtctcacaggaagatccggaggttcaatttaattggtacgtcgatggtgttgaagtgcataatgcgaagactaagccgagagaggaacagttcaattccacttatcgcgtggtttcagtccttacagtcttgcaccaagattggcttaacggaaaggaatataagtgcaaggtaagtaataaagggcttccatcaagcattgaaaaaaccataagtaaagcaaaaggacaaccgagggagccccaagtctacacgcttcctccttctcaggaggagatgaccaaaaaccaggtaagtttgacgtgtttggtaaaggggttttatccctcagatattgctgtcgaatgggagtctaatggtcagcctgagaacaattacaagactacgccacccgttctggattcagacggatctttcttcctctacagcaaattgacggtagacaaaagccgctggcaagagggcaatgtcttcagttgttctgtaatgcacgaagccctccataatcactacacgcagaaatctctgagcttgtctcttgggaaa

SEQ ID NO: 632 - DNA, 1146 bp, Artificial Sequence
  source: /note="Description of Artificial Sequence: Synthetic polynucleotide"
gcccctacgtcctcctcaactaaaaagacgcaacttcagcttgagcatcttcttctcgaccttcagatgattttgaacggaatcaataattacaaaaatcctaaacttactgaaatgctcacgtttaagttttatatgccaaaaaaggccactgagttgaaacaccttcaatgcttggaggaggaacttaaaccacttgaggaagccttgaatcttgctccgtccaaaaactttcatttgcggccacgagatctgataagcaacatcaacgtgatcgtcctggaactgaaaggaagcgaaacgacgtttatgtgcgaatatgcagacgaaactgcgacaatcgttgaatttctcaatcgatggatcacttttagccaatctatcatcagcacgttgactggtggtggaggatcgggaggtggaggatctggaggaggaggatcgggtggaggaggatccgaaagtaagtatggccctccttgccctccgtgccctgcacctgagttcctcggcggtccttcagtgtttttgtttccacccaaacctaaagacacccttatgatctctcgaacacctgaagtaacctgtgtagttgttgatgtctcacaggaagatccggaggttcaatttaattggtacgtcgatggtgttgaagtgcataatgcgaagactaagccgagagaggaacagttcaattccacttatcgcgtggtttcagtccttacagtcttgcaccaagattggcttaacggaaaggaatataagtgcaaggtaagtaataaagggcttccatcaagcattgaaaaaaccataagtaaagcaaaaggacaaccgagggagccccaagtctacacgcttcctccttctcaggaggagatgaccaaaaaccaggtaagtttgacgtgtttggtaaaggggttttatccctcagatattgctgtcgaatgggagtctaatggtcagcctgagaacaattacaagactacgccacccgttctggattcagacggatctttcttcctctacagcaaattgacggtagacaaaagccgctggcaagagggcaatgtcttcagttgttctgtaatgcacgaagccctccataatcactacacgcagaaatctctgagcttgtctcttgggaaa

SEQ ID NO: 633 - DNA, 1146 bp, Artificial Sequence
  source: /note="Description of Artificial Sequence: Synthetic polynucleotide"
gcccctacgtcctcctcaactaaaaagacgcaacttcagcttgagcatcttcttctcgaccttcagatgattttgaacggaatcaataattacaaaaatcctaaacttactagaatgctcacgaagaagttttatatgccaaaaaaggccactgagttgaaacaccttcaatgcttggaggaggaacttaaaccacttgaggaagccttgaatcttgctccgtccaaaaactttcatttgcggccacgagatctgataagcaacatcaacgtgatcgtcctggaactgaaaggaagcgaaacgacgtttatgtgcgaatatgcagacgaaactgcgacaatcgttgaatttctcaatcgatggatcacttttagccaatctatcatcagcacgttgactggtggtggaggatcgggaggtggaggatctggaggaggaggatcgggtggaggaggatccgaaagtaagtatggccctccttgccctccgtgccctgcacctgagttcctcggcggtccttcagtgtttttgtttccacccaaacctaaagacacccttatgatctctcgaacacctgaagtaacctgtgtagttgttgatgtctcacaggaagatccggaggttcaatttaattggtacgtcgatggtgttgaagtgcataatgcgaagactaagccgagagaggaacagttcaattccacttatcgcgtggtttcagtccttacagtcttgcaccaagattggcttaacggaaaggaatataagtgcaaggtaagtaataaagggcttccatcaagcattgaaaaaaccataagtaaagcaaaaggacaaccgagggagccccaagtctacacgcttcctccttctcaggaggagatgaccaaaaaccaggtaagtttgacgtgtttggtaaaggggttttatccctcagatattgctgtcgaatgggagtctaatggtcagcctgagaacaattacaagactacgccacccgttctggattcagacggatctttcttcctctacagcaaattgacggtagacaaaagccgctggcaagagggcaatgtcttcagttgttctgtaatgcacgaagccctccataatcactacacgcagaaatctctgagcttgtctcttgggaaa

SEQ ID NO: 634 - DNA, 1146 bp, Artificial Sequence
  source: /note="Description of Artificial Sequence: Synthetic polynucleotide"
gcccctacgtcctcctcaactaaaaagacgcaacttcagcttgagcatcttcttctcgaccttcagatgattttgaacggaatcaataattacaaaaatcctaaacttactagaatgctcacgcagaagttttatatgccaaaaaaggccactgagttgaaacaccttcaatgcttggaggaggaacttaaaccacttgaggaagccttgaatcttgctccgtccaaaaactttcatttgcggccacgagatctgataagcaacatcaacgtgatcgtcctggaactgaaaggaagcgaaacgacgtttatgtgcgaatatgcagacgaaactgcgacaatcgttgaatttctcaatcgatggatcacttttagccaatctatcatcagcacgttgactggtggtggaggatcgggaggtggaggatctggaggaggaggatcgggtggaggaggatccgaaagtaagtatggccctccttgccctccgtgccctgcacctgagttcctcggcggtccttcagtgtttttgtttccacccaaacctaaagacacccttatgatctctcgaacacctgaagtaacctgtgtagttgttgatgtctcacaggaagatccggaggttcaatttaattggtacgtcgatggtgttgaagtgcataatgcgaagactaagccgagagaggaacagttcaattccacttatcgcgtggtttcagtccttacagtcttgcaccaagattggcttaacggaaaggaatataagtgcaaggtaagtaataaagggcttccatcaagcattgaaaaaaccataagtaaagcaaaaggacaaccgagggagccccaagtctacacgcttcctccttctcaggaggagatgaccaaaaaccaggtaagtttgacgtgtttggtaaaggggttttatccctcagatattgctgtcgaatgggagtctaatggtcagcctgagaacaattacaagactacgccacccgttctggattcagacggatctttcttcctctacagcaaattgacggtagacaaaagccgctggcaagagggcaatgtcttcagttgttctgtaatgcacgaagccctccataatcactacacgcagaaatctctgagcttgtctcttgggaaa

SEQ ID NO: 635 - DNA, 1146 bp, Artificial Sequence
  source: /note="Description of Artificial Sequence: Synthetic polynucleotide"
gcccctacgtcctcctcaactaaaaagacgcaacttcagcttgagcatcttcttctcgaccttcagatgattttgaacggaatcaataattacaaaaatcctaaacttactagaatgctcacggcaaagtttgctatgccaaaaaaggccactgagttgaaacaccttcaatgcttggaggaggaacttaaaccacttgaggaagccttgaatggtgctccgtccaaaaactttcatttgcggccacgagatctgataagcgatatcaacgtgatcgtcctggaactgaaaggaagcgaaacgacgtttatgtgcgaatatgcagacgaaactgcgacaatcgttgaatttctcaatcgatggatcacttttagccaatctatcatcagcacgttgactggtggtggaggatcgggaggtggaggatctggaggaggaggatcgggtggaggaggatccgaaagtaagtatggccctccttgccctccgtgccctgcacctgagttcctcggcggtccttcagtgtttttgtttccacccaaacctaaagacacccttatgatctctcgaacacctgaagtaacctgtgtagttgttgatgtctcacaggaagatccggaggttcaatttaattggtacgtcgatggtgttgaagtgcataatgcgaagactaagccgagagaggaacagttcaattccacttatcgcgtggtttcagtccttacagtcttgcaccaagattggcttaacggaaaggaatataagtgcaaggtaagtaataaagggcttccatcaagcattgaaaaaaccataagtaaagcaaaaggacaaccgagggagccccaagtctacacgcttcctccttctcaggaggagatgaccaaaaaccaggtaagtttgacgtgtttggtaaaggggttttatccctcagatattgctgtcgaatgggagtctaatggtcagcctgagaacaattacaagactacgccacccgttctggattcagacggatctttcttcctctacagcaaattgacggtagacaaaagccgctggcaagagggcaatgtcttcagttgttctgtaatgcacgaagccctccataatcactacacgcagaaatctctgagcttgtctcttgggaaa

SEQ ID NO: 636 - DNA, 1146 bp, Artificial Sequence
  source: /note="Description of Artificial Sequence: Synthetic polynucleotide"
gcccctacgtcctcctcaactaaaaagacgcaacttcagcttgagcatcttcttctcgaccttcagatgattttgaacggaatcaataattacaaaaatcctaaacttactaacatgctcacgtttaagttttatatgccaaaaaaggccactgagttgaaacaccttcaatgcttggaggaggaacttaaaccacttgaggaagccttgaatcttgctccgtccaaaaactttcatttgcggccacgagatctgataaggaacatcaacgtgatcgtcctggaactgaaaggaagcgaaacgacgtttatgtgcgaatatgcagacgaaactgcgacaatcgttgaatttctcaatcgatggatcacttttagccaatctatcatcagcacgttgactggtggtggaggatcgggaggtggaggatctggaggaggaggatcgggtggaggaggatccgaaagtaagtatggccctccttgccctccgtgccctgcacctgagttcctcggcggtccttcagtgtttttgtttccacccaaacctaaagacacccttatgatctctcgaacacctgaagtaacctgtgtagttgttgatgtctcacaggaagatccggaggttcaatttaattggtacgtcgatggtgttgaagtgcataatgcgaagactaagccgagagaggaacagttcaattccacttatcgcgtggtttcagtccttacagtcttgcaccaagattggcttaacggaaaggaatataagtgcaaggtaagtaataaagggcttccatcaagcattgaaaaaaccataagtaaagcaaaaggacaaccgagggagccccaagtctacacgcttcctccttctcaggaggagatgaccaaaaaccaggtaagtttgacgtgtttggtaaaggggttttatccctcagatattgctgtcgaatgggagtctaatggtcagcctgagaacaattacaagactacgccacccgttctggattcagacggatctttcttcctctacagcaaattgacggtagacaaaagccgctggcaagagggcaatgtcttcagttgttctgtaatgcacgaagccctccataatcactacacgcagaaatctctgagcttgtctcttgggaaa

SEQ ID NO: 637 - DNA, 1146 bp, Artificial Sequence
  source: /note="Description of Artificial Sequence: Synthetic polynucleotide"
gcccctacgtcctcctcaactaaaaagacgcaacttcagcttgagaaccttcttctcgaccttcagatgattttgaacggaatcaataattacaaaaatcctaaacttactgaaatgctcacgtttaagttttatatgccaaaaaaggccactgagttgaaacaccttcaatgcttggaggaggaacttaaaccacttgaggaagccttgaatcttgctccgtccaaaaactttcatttgcggccacgagatctgataagcaacatcaacgtgatcgtcctggaactgaaaggaagcgaaacgacgtttatgtgcgaatatgcagacgaaactgcgacaatcgttgaatttctcaatcgatggatcacttttagccaatctatcatcagcacgttgactggtggtggaggatcgggaggtggaggatctggaggaggaggatcgggtggaggaggatccgaaagtaagtatggccctccttgccctccgtgccctgcacctgagttcctcggcggtccttcagtgtttttgtttccacccaaacctaaagacacccttatgatctctcgaacacctgaagtaacctgtgtagttgttgatgtctcacaggaagatccggaggttcaatttaattggtacgtcgatggtgttgaagtgcataatgcgaagactaagccgagagaggaacagttcaattccacttatcgcgtggtttcagtccttacagtcttgcaccaagattggcttaacggaaaggaatataagtgcaaggtaagtaataaagggcttccatcaagcattgaaaaaaccataagtaaagcaaaaggacaaccgagggagccccaagtctacacgcttcctccttctcaggaggagatgaccaaaaaccaggtaagtttgacgtgtttggtaaaggggttttatccctcagatattgctgtcgaatgggagtctaatggtcagcctgagaacaattacaagactacgccacccgttctggattcagacggatctttcttcctctacagcaaattgacggtagacaaaagccgctggcaagagggcaatgtcttcagttgttctgtaatgcacgaagccctccataatcactacacgcagaaatctctgagcttgtctcttgggaaa

SEQ ID NO: 638 - DNA, 1146 bp, Artificial Sequence
  source: /note="Description of Artificial Sequence: Synthetic polynucleotide"
gcccctacgtcctcctcaactaaaaagacgcaacttcagcttgagcatcttcttctcgaccttcagatgattttgaacggaatcaataattacaaaaatcctaaacttactgaaatgctcacgtttaagttttatatgccaaaaaaggccactgagttgaaacaccttcaatgcttggaggaggaacttaaaccacttgaggaagccttgaatcttgctccgtccaaaaactttcatttgcggccacgagtcctgataagcaacatcaacgtgatcgtcctggaactgaaaggaagcgaaacgacgtttatgtgcgaatatgcagacgaaactgcgacaatcgttgaatttctcaatcgatggatcacttttagccaatctatcatcagcacgttgactggtggtggaggatcgggaggtggaggatctggaggaggaggatcgggtggaggaggatccgaaagtaagtatggccctccttgccctccgtgccctgcacctgagttcctcggcggtccttcagtgtttttgtttccacccaaacctaaagacacccttatgatctctcgaacacctgaagtaacctgtgtagttgttgatgtctcacaggaagatccggaggttcaatttaattggtacgtcgatggtgttgaagtgcataatgcgaagactaagccgagagaggaacagttcaattccacttatcgcgtggtttcagtccttacagtcttgcaccaagattggcttaacggaaaggaatataagtgcaaggtaagtaataaagggcttccatcaagcattgaaaaaaccataagtaaagcaaaaggacaaccgagggagccccaagtctacacgcttcctccttctcaggaggagatgaccaaaaaccaggtaagtttgacgtgtttggtaaaggggttttatccctcagatattgctgtcgaatgggagtctaatggtcagcctgagaacaattacaagactacgccacccgttctggattcagacggatctttcttcctctacagcaaattgacggtagacaaaagccgctggcaagagggcaatgtcttcagttgttctgtaatgcacgaagccctccataatcactacacgcagaaatctctgagcttgtctcttgggaaa

SEQ ID NO: 639 - DNA, 1146 bp, Artificial Sequence
  source: /note="Description of Artificial Sequence: Synthetic polynucleotide"
gcccctacgtcctcctcaactaaaaagacgcaacttcagcttgagcatcttcttctcgaccttcagatgattttgaacggaatcaataattacaaaaatcctaaacttactgaaatgctcacgtttaagttttatatgccaaaaaaggccactgagttgaaacaccttcaatgcttggaggaggaacttaaaccacttgaggaagccttgaatcttgctccgtccaaaaactttcatttgcggccacgagatctgataaggaacatcaacgtgatcgtcctggaactgaaaggaagcgaaacgacgtttatgtgcgaatatgcagacgaaactgcgacaatcgttgaatttctcaatcgatggatcacttttagccaatctatcatcagcacgttgactggtggtggaggatcgggaggtggaggatctggaggaggaggatcgggtggaggaggatccgaaagtaagtatggccctccttgccctccgtgccctgcacctgagttcctcggcggtccttcagtgtttttgtttccacccaaacctaaagacacccttatgatctctcgaacacctgaagtaacctgtgtagttgttgatgtctcacaggaagatccggaggttcaatttaattggtacgtcgatggtgttgaagtgcataatgcgaagactaagccgagagaggaacagttcaattccacttatcgcgtggtttcagtccttacagtcttgcaccaagattggcttaacggaaaggaatataagtgcaaggtaagtaataaagggcttccatcaagcattgaaaaaaccataagtaaagcaaaaggacaaccgagggagccccaagtctacacgcttcctccttctcaggaggagatgaccaaaaaccaggtaagtttgacgtgtttggtaaaggggttttatccctcagatattgctgtcgaatgggagtctaatggtcagcctgagaacaattacaagactacgccacccgttctggattcagacggatctttcttcctctacagcaaattgacggtagacaaaagccgctggcaagagggcaatgtcttcagttgttctgtaatgcacgaagccctccataatcactacacgcagaaatctctgagcttgtctcttgggaaa

SEQ ID NO: 640 - DNA, 1146 bp, Artificial Sequence
  source: /note="Description of Artificial Sequence: Synthetic polynucleotide"
gcccctacgtcctcctcaactaaaaagacgcaacttcagcttgagcatcttcttctcgaccttcagatgattttgaacggaatcaataattacaaaaatcctaaacttactgaaatgctcacgtttaagttttatatgccaaaaaaggccactgagttgaaacaccttcaatgcttggaggaggaacttaaaccacttgaggaagccttgaatcttgctccgtccaaaaactttcatttgcggccacgagatctgataagcaacatcaacgtgagcgtcctggaactgaaaggaagcgaaacgacgtttatgtgcgaatatgcagacgaaactgcgacaatcgttgaatttctcaatcgatggatcacttttagccaatctatcatcagcacgttgactggtggtggaggatcgggaggtggaggatctggaggaggaggatcgggtggaggaggatccgaaagtaagtatggccctccttgccctccgtgccctgcacctgagttcctcggcggtccttcagtgtttttgtttccacccaaacctaaagacacccttatgatctctcgaacacctgaagtaacctgtgtagttgttgatgtctcacaggaagatccggaggttcaatttaattggtacgtcgatggtgttgaagtgcataatgcgaagactaagccgagagaggaacagttcaattccacttatcgcgtggtttcagtccttacagtcttgcaccaagattggcttaacggaaaggaatataagtgcaaggtaagtaataaagggcttccatcaagcattgaaaaaaccataagtaaagcaaaaggacaaccgagggagccccaagtctacacgcttcctccttctcaggaggagatgaccaaaaaccaggtaagtttgacgtgtttggtaaaggggttttatccctcagatattgctgtcgaatgggagtctaatggtcagcctgagaacaattacaagactacgccacccgttctggattcagacggatctttcttcctctacagcaaattgacggtagacaaaagccgctggcaagagggcaatgtcttcagttgttctgtaatgcacgaagccctccataatcactacacgcagaaatctctgagcttgtctcttgggaaa

SEQ ID NO: 641 - DNA, 1146 bp, Artificial Sequence
  source: /note="Description of Artificial Sequence: Synthetic polynucleotide"
gcccctacgtcctcctcaactaaaaagacgcaacttcagcttgagaaccttcttctcgaccttcagatgattttgaacggaatcaataattacaaaaatcctaaacttactagaatgctcacgcagaagttttatatgccaaaaaaggccactgagttgaaacaccttcaatgcttggaggaggaacttaaaccacttgaggaagccttgaatcttgctccgtccaaaaactttcatttgcggccacgagatctgataagcaacatcaacgtgatcgtcctggaactgaaaggaagcgaaacgacgtttatgtgcgaatatgcagacgaaactgcgacaatcgttgaatttctcaatcgatggatcacttttagccaatctatcatcagcacgttgactggtggtggaggatcgggaggtggaggatctggaggaggaggatcgggtggaggaggatccgaaagtaagtatggccctccttgccctccgtgccctgcacctgagttcctcggcggtccttcagtgtttttgtttccacccaaacctaaagacacccttatgatctctcgaacacctgaagtaacctgtgtagttgttgatgtctcacaggaagatccggaggttcaatttaattggtacgtcgatggtgttgaagtgcataatgcgaagactaagccgagagaggaacagttcaattccacttatcgcgtggtttcagtccttacagtcttgcaccaagattggcttaacggaaaggaatataagtgcaaggtaagtaataaagggcttccatcaagcattgaaaaaaccataagtaaagcaaaaggacaaccgagggagccccaagtctacacgcttcctccttctcaggaggagatgaccaaaaaccaggtaagtttgacgtgtttggtaaaggggttttatccctcagatattgctgtcgaatgggagtctaatggtcagcctgagaacaattacaagactacgccacccgttctggattcagacggatctttcttcctctacagcaaattgacggtagacaaaagccgctggcaagagggcaatgtcttcagttgttctgtaatgcacgaagccctccataatcactacacgcagaaatctctgagcttgtctcttgggaaa

SEQ ID NO: 642 - DNA, 1146 bp, Artificial Sequence
  source: /note="Description of Artificial Sequence: Synthetic polynucleotide"
gcccctacgtcctcctcaactaaaaagacgcaacttcagcttgagcatcttcttctcgaccttcagatgattttgaacggaatcaataattacaaaaatcctaaacttactagaatgctcacgcagaagttttatatgccaaaaaaggccactgagttgaaacaccttcaatgcttggaggaggaacttaaaccacttgaggaagccttgaatcttgctccgtccaaaaactttcatttgcggccacgagatctgataagcaacatcaacgtgagcgtcctggaactgaaaggaagcgaaacgacgtttatgtgcgaatatgcagacgaaactgcgacaatcgttgaatttctcaatcgatggatcacttttagccaatctatcatcagcacgttgactggtggtggaggatcgggaggtggaggatctggaggaggaggatcgggtggaggaggatccgaaagtaagtatggccctccttgccctccgtgccctgcacctgagttcctcggcggtccttcagtgtttttgtttccacccaaacctaaagacacccttatgatctctcgaacacctgaagtaacctgtgtagttgttgatgtctcacaggaagatccggaggttcaatttaattggtacgtcgatggtgttgaagtgcataatgcgaagactaagccgagagaggaacagttcaattccacttatcgcgtggtttcagtccttacagtcttgcaccaagattggcttaacggaaaggaatataagtgcaaggtaagtaataaagggcttccatcaagcattgaaaaaaccataagtaaagcaaaaggacaaccgagggagccccaagtctacacgcttcctccttctcaggaggagatgaccaaaaaccaggtaagtttgacgtgtttggtaaaggggttttatccctcagatattgctgtcgaatgggagtctaatggtcagcctgagaacaattacaagactacgccacccgttctggattcagacggatctttcttcctctacagcaaattgacggtagacaaaagccgctggcaagagggcaatgtcttcagttgttctgtaatgcacgaagccctccataatcactacacgcagaaatctctgagcttgtctcttgggaaa

SEQ ID NO: 643 - DNA, 1146 bp, Artificial Sequence
  source: /note="Description of Artificial Sequence: Synthetic polynucleotide"
gcccctacgtcctcctcaactaaaaagacgcaacttcagcttgagaaccttcttctcgaccttcagatgattttgaacggaatcaataattacaaaaatcctgaacttactaacatgctcacgtttaagttttatatgccaaaaaaggccactgagttgaaacaccttcaatgcttggaggaggaacttaaaccacttgaggaagccttgaatcttgctccgtccaaaaactttcatttgcggccacgagatctgataagcaacatcaacgtgatcgtcctggaactgaaaggaagcgaaacgacgtttatgtgcgaatatgcagacgaaactgcgacaatcgttgaatttctcaatcgatggatcacttttagccaatctatcatcagcacgttgactggtggtggaggatcgggaggtggaggatctggaggaggaggatcgggtggaggaggatccgaaagtaagtatggccctccttgccctccgtgccctgcacctgagttcctcggcggtccttcagtgtttttgtttccacccaaacctaaagacacccttatgatctctcgaacacctgaagtaacctgtgtagttgttgatgtctcacaggaagatccggaggttcaatttaattggtacgtcgatggtgttgaagtgcataatgcgaagactaagccgagagaggaacagttcaattccacttatcgcgtggtttcagtccttacagtcttgcaccaagattggcttaacggaaaggaatataagtgcaaggtaagtaataaagggcttccatcaagcattgaaaaaaccataagtaaagcaaaaggacaaccgagggagccccaagtctacacgcttcctccttctcaggaggagatgaccaaaaaccaggtaagtttgacgtgtttggtaaaggggttttatccctcagatattgctgtcgaatgggagtctaatggtcagcctgagaacaattacaagactacgccacccgttctggattcagacggatctttcttcctctacagcaaattgacggtagacaaaagccgctggcaagagggcaatgtcttcagttgttctgtaatgcacgaagccctccataatcactacacgcagaaatctctgagcttgtctcttgggaaa

SEQ ID NO: 644 - DNA, 1146 bp, Artificial Sequence
  source: /note="Description of Artificial Sequence: Synthetic polynucleotide"
gcccctacgtcctcctcaactaaaaagacgcaacttcagcttgagcatcttcttctcgaccttcagatgattttgaacggaatcaataattacaaaaatcctaaacttactagaatgctcacgtttaagttttatatgccaaaaaaggccactgagttgaaacaccttcaatgcttggaggaggaacttaaaccacttgaggaagtattgaatcttgctcagtccaaaaactttcatttgcggccacgagatctgataagcaacatcaacgtgatcgtcctggaactgaaaggaagcgaaacgacgtttatgtgcgaatatgcagacgaaactgcgacaatcgttgaatttctcaatcgatggatcacttttagccaatctatcatcagcacgttgactggtggtggaggatcgggaggtggaggatctggaggaggaggatcgggtggaggaggatccgaaagtaagtatggccctccttgccctccgtgccctgcacctgagttcctcggcggtccttcagtgtttttgtttccacccaaacctaaagacacccttatgatctctcgaacacctgaagtaacctgtgtagttgttgatgtctcacaggaagatccggaggttcaatttaattggtacgtcgatggtgttgaagtgcataatgcgaagactaagccgagagaggaacagttcaattccacttatcgcgtggtttcagtccttcaggtcttgcacgtggattggcttaacggaaaggaatataagtgcaaggtaagtaataaagggcttccatcaagcattgaaaaaaccataagtaaagcaaaaggacaaccgagggagccccaagtctacacgcttcctccttctcaggaggagatgaccaaaaaccaggtaagtttgacgtgtttggtaaaggggttttatccctcagatattgttgtcgaatgggagtctaatggtcagcctgagaacaattacaagactacgccacccgttctggattcagacggatctttcttcctctacagcagattgacggtagacaaaagccgctggcaagagggcaatgtcttcagttgttctgtaatgcacgaagccctccataatcactacacgcagaaatctctgagcttgtctcttgggaaa

SEQ ID NO: 645 - DNA, 1146 bp, Artificial Sequence
  source: /note="Description of Artificial Sequence: Synthetic polynucleotide"
gcccctacgtcctcctcaactaaaaagacgcaacttcagcttgagcatcttcttctcgaccttcagatgattttgaacggaatcaataattacaaaaatcctaaacttactagaatgctcacgtttaagttttatatgccaaaaaaggccactgagttgaaacaccttcaatgcttggaggaggaacttaaaccacttgaggaagccttgaatcttgctccgtccaaaaactttcatttgcggccacgagatctgataagcaacatcaacgtgatcgtcctggaactgaaaggaagcgaaacgacgtttatgtgcgaatatgcagacgaaactgcgacaatcgttgaatttctcaatcgatggatcacttttagccaatctatcatcagcacgttgactggtggtggaggatcgggaggtggaggatctggaggaggaggatcgggtggaggaggatccgaaagtaagtatggccctccttgccctccgtgccctgcacctgagttcctcggcggtccttcagtgtttttgtttccacccaaacctaaagacacccttatgatctctcgaacacctgaagtaacctgtgtagttgttgatgtctcacaggaagatccggaggttcaatttaattggtacgtcgatggtgttgaagtgcataatgcgaagactaagccgagagaggaacagttcaattccacttatcgcgtggtttcagtccttcaggtcttgcacgtggattggcttaacggaaaggaatataagtgcaaggtaagtaataaagggcttccatcaagcattgaaaaaaccataagtaaagcaaaaggacaaccgagggagccccaagtctacacgcttcctccttctcaggaggagatgaccaaaaaccaggtaagtttgacgtgtttggtaaaggggttttatccctcagatattgttgtcgaatgggagtctaatggtcagcctgagaacaattacaagactacgccacccgttctggattcagacggatctttcttcctctacagcagattgacggtagacaaaagccgctggcaagagggcaatgtcttcagttgttctgtaatgcacgaagccctccataatcactacacgcagaaatctctgagcttgtctcttgggaaa

SEQ ID NO: 646 - DNA, 1146 bp, Artificial Sequence
  source: /note="Description of Artificial Sequence: Synthetic polynucleotide"
gcccctacgtcctcctcaactaaaaagacgcaacttcagcttgaggatcttcttctcgaccttcagatgattttgaacggaatcaataattacaaaaatcctaaacttactagaatgctcacgtttaagttttatatgccaaaaaaggccactgagttgaaacaccttcaatgcttggaggaggaacttaaaccacttgaggaagccttgaatcttgctccgtccaaaaactttcatttgcggccacgagatctgataagcaacatcaacgtgatcgtcctggaactgaaaggaagcgaaacgacgtttatgtgcgaatatgcagacgaaactgcgacaatcgttgaatttctcaatcgatggatcacttttagccaatctatcatcagcacgttgactggtggtggaggatcgggaggtggaggatctggaggaggaggatcgggtggaggaggatccgaaagtaagtatggccctccttgccctccgtgccctgcacctgagttcctcggcggtccttcagtgtttttgtttccacccaaacctaaagacacccttatgatctctcgaacacctgaagtaacctgtgtagttgttgatgtctcacaggaagatccggaggttcaatttaattggtacgtcgatggtgttgaagtgcataatgcgaagactaagccgagagaggaacagttcaattccacttatcgcgtggtttcagtccttcaggtcttgcacgtggattggcttaacggaaaggaatataagtgcaaggtaagtaataaagggcttccatcaagcattgaaaaaaccataagtaaagcaaaaggacaaccgagggagccccaagtctacacgcttcctccttctcaggaggagatgaccaaaaaccaggtaagtttgacgtgtttggtaaaggggttttatccctcagatattgttgtcgaatgggagtctaatggtcagcctgagaacaattacaagactacgccacccgttctggattcagacggatctttcttcctctacagcagattgacggtagacaaaagccgctggcaagagggcaatgtcttcagttgttctgtaatgcacgaagccctccataatcactacacgcagaaatctctgagcttgtctcttgggaaa

SEQ ID NO: 647 - DNA, 1146 bp, Artificial Sequence
  source: /note="Description of Artificial Sequence: Synthetic polynucleotide"
gcccctacgtcctcctcaactaaaaagacgcaacttcagcttgagaatcttcttctcgaccttcagatgattttgaacggaatcaataattacaaaaatcctaaacttactagaatgctcacgtttaagttttatatgccaaaaaaggccactgagttgaaacaccttcaatgcttggaggaggaacttaaaccacttgaggaagccttgaatcttgctccgtccaaaaactttcatttgcggccacgagatctgataagcaacatcaacgtgatcgtcctggaactgaaaggaagcgaaacgacgtttatgtgcgaatatgcagacgaaactgcgacaatcgttgaatttctcaatcgatggatcacttttagccaatctatcatcagcacgttgactggtggtggaggatcgggaggtggaggatctggaggaggaggatcgggtggaggaggatccgaaagtaagtatggccctccttgccctccgtgccctgcacctgagttcctcggcggtccttcagtgtttttgtttccacccaaacctaaagacacccttatgatctctcgaacacctgaagtaacctgtgtagttgttgatgtctcacaggaagatccggaggttcaatttaattggtacgtcgatggtgttgaagtgcataatgcgaagactaagccgagagaggaacagttcaattccacttatcgcgtggtttcagtccttcaggtcttgcacgtggattggcttaacggaaaggaatataagtgcaaggtaagtaataaagggcttccatcaagcattgaaaaaaccataagtaaagcaaaaggacaaccgagggagccccaagtctacacgcttcctccttctcaggaggagatgaccaaaaaccaggtaagtttgacgtgtttggtaaaggggttttatccctcagatattgttgtcgaatgggagtctaatggtcagcctgagaacaattacaagactacgccacccgttctggattcagacggatctttcttcctctacagcagattgacggtagacaaaagccgctggcaagagggcaatgtcttcagttgttctgtaatgcacgaagccctccataatcactacacgcagaaatctctgagcttgtctcttgggaaa

SEQ ID NO: 648 - DNA, 1146 bp, Artificial Sequence
  source: /note="Description of Artificial Sequence: Synthetic polynucleotide"
gcccctacgtcctcctcaactaaaaagacgcaacttcagcttgagctgcttcttctcgaccttcagatgattttgaacggaatcaataattacaaaaatcctaaacttactagaatgctcacgtttaagttttatatgccaaaaaaggccactgagttgaaacaccttcaatgcttggaggaggaacttaaaccacttgaggaagccttgaatcttgctccgtccaaaaactttcatttgcggccacgagatctgataagcaacatcaacgtgatcgtcctggaactgaaaggaagcgaaacgacgtttatgtgcgaatatgcagacgaaactgcgacaatcgttgaatttctcaatcgatggatcacttttagccaatctatcatcagcacgttgactggtggtggaggatcgggaggtggaggatctggaggaggaggatcgggtggaggaggatccgaaagtaagtatggccctccttgccctccgtgccctgcacctgagttcctcggcggtccttcagtgtttttgtttccacccaaacctaaagacacccttatgatctctcgaacacctgaagtaacctgtgtagttgttgatgtctcacaggaagatccggaggttcaatttaattggtacgtcgatggtgttgaagtgcataatgcgaagactaagccgagagaggaacagttcaattccacttatcgcgtggtttcagtccttcaggtcttgcacgtggattggcttaacggaaaggaatataagtgcaaggtaagtaataaagggcttccatcaagcattgaaaaaaccataagtaaagcaaaaggacaaccgagggagccccaagtctacacgcttcctccttctcaggaggagatgaccaaaaaccaggtaagtttgacgtgtttggtaaaggggttttatccctcagatattgttgtcgaatgggagtctaatggtcagcctgagaacaattacaagactacgccacccgttctggattcagacggatctttcttcctctacagcagattgacggtagacaaaagccgctggcaagagggcaatgtcttcagttgttctgtaatgcacgaagccctccataatcactacacgcagaaatctctgagcttgtctcttgggaaa

SEQ ID NO: 649 - DNA, 1146 bp, Artificial Sequence
  source: /note="Description of Artificial Sequence: Synthetic polynucleotide"
gcccctacgtcctcctcaactaaaaagacgcaacttcagcttgagcatcttcttctcgaccttcagatgattttgaacggaaccaataattacaaaaatcctaaacttactagaatgctcacgtttaagttttatatgccaaaaaaggccactgagttgaaacaccttcaatgcttggaggaggaacttaaaccacttgaggaagccttgaatcttgctccgtccaaaaactttcatttgcggccacgagatctgataagcaacatcaacgtgatcgtcctggaactgaaaggaagcgaaacgacgtttatgtgcgaatatgcagacgaaactgcgacaatcgttgaatttctcaatcgatggatcacttttagccaatctatcatcagcacgttgactggtggtggaggatcgggaggtggaggatctggaggaggaggatcgggtggaggaggatccgaaagtaagtatggccctccttgccctccgtgccctgcacctgagttcctcggcggtccttcagtgtttttgtttccacccaaacctaaagacacccttatgatctctcgaacacctgaagtaacctgtgtagttgttgatgtctcacaggaagatccggaggttcaatttaattggtacgtcgatggtgttgaagtgcataatgcgaagactaagccgagagaggaacagttcaattccacttatcgcgtggtttcagtccttcaggtcttgcacgtggattggcttaacggaaaggaatataagtgcaaggtaagtaataaagggcttccatcaagcattgaaaaaaccataagtaaagcaaaaggacaaccgagggagccccaagtctacacgcttcctccttctcaggaggagatgaccaaaaaccaggtaagtttgacgtgtttggtaaaggggttttatccctcagatattgttgtcgaatgggagtctaatggtcagcctgagaacaattacaagactacgccacccgttctggattcagacggatctttcttcctctacagcagattgacggtagacaaaagccgctggcaagagggcaatgtcttcagttgttctgtaatgcacgaagccctccataatcactacacgcagaaatctctgagcttgtctcttgggaaa

SEQ ID NO: 650 - DNA, 1146 bp, Artificial Sequence
  source: /note="Description of Artificial Sequence: Synthetic polynucleotide"
gcccctacgtcctcctcaactaaaaagacgcaacttcagcttgagcatcttcttctcgaccttcagatgattttgaacggaatcaataattacaaaaatcctaaacttactagaatgctcacgtttaagttttatatgccaaaaaaggccactgagttgaaacaccttcaatgcttggaggaggaacttaaaccacttgaggaagccttgaatcttgctccgtccaaaaactttcatttgcggccacgagttctgataagcaacatcaacgtgatcgtcctggaactgaaaggaagcgaaacgacgtttatgtgcgaatatgcagacgaaactgcgacaatcgttgaatttctcaatcgatggatcacttttagccaatctatcatcagcacgttgactggtggtggaggatcgggaggtggaggatctggaggaggaggatcgggtggaggaggatccgaaagtaagtatggccctccttgccctccgtgccctgcacctgagttcctcggcggtccttcagtgtttttgtttccacccaaacctaaagacacccttatgatctctcgaacacctgaagtaacctgtgtagttgttgatgtctcacaggaagatccggaggttcaatttaattggtacgtcgatggtgttgaagtgcataatgcgaagactaagccgagagaggaacagttcaattccacttatcgcgtggtttcagtccttcaggtcttgcacgtggattggcttaacggaaaggaatataagtgcaaggtaagtaataaagggcttccatcaagcattgaaaaaaccataagtaaagcaaaaggacaaccgagggagccccaagtctacacgcttcctccttctcaggaggagatgaccaaaaaccaggtaagtttgacgtgtttggtaaaggggttttatccctcagatattgttgtcgaatgggagtctaatggtcagcctgagaacaattacaagactacgccacccgttctggattcagacggatctttcttcctctacagcagattgacggtagacaaaagccgctggcaagagggcaatgtcttcagttgttctgtaatgcacgaagccctccataatcactacacgcagaaatctctgagcttgtctcttgggaaa

SEQ ID NO: 651 - DNA, 1146 bp, Artificial Sequence
  source: /note="Description of Artificial Sequence: Synthetic polynucleotide"
gcccctacgtcctcctcaactaaaaagacgcaacttcagcttgagcatcttcttctcgaccttcagatgattttgaacggaatcaataattacaaaaatcctaaacttactagaatgctcacgtttaagttttatatgccaaaaaaggccactgagttgaaacaccttcaatgcttggaggaggaacttaaaccacttgaggaagccttgaatcttgctccgtccaaaaactttcatttgcggccacgagatctgatacgtaacatcaacgtgatcgtcctggaactgaaaggaagcgaaacgacgtttatgtgcgaatatgcagacgaaactgcgacaatcgttgaatttctcaatcgatggatcacttttagccaatctatcatcagcacgttgactggtggtggaggatcgggaggtggaggatctggaggaggaggatcgggtggaggaggatccgaaagtaagtatggccctccttgccctccgtgccctgcacctgagttcctcggcggtccttcagtgtttttgtttccacccaaacctaaagacacccttatgatctctcgaacacctgaagtaacctgtgtagttgttgatgtctcacaggaagatccggaggttcaatttaattggtacgtcgatggtgttgaagtgcataatgcgaagactaagccgagagaggaacagttcaattccacttatcgcgtggtttcagtccttcaggtcttgcacgtggattggcttaacggaaaggaatataagtgcaaggtaagtaataaagggcttccatcaagcattgaaaaaaccataagtaaagcaaaaggacaaccgagggagccccaagtctacacgcttcctccttctcaggaggagatgaccaaaaaccaggtaagtttgacgtgtttggtaaaggggttttatccctcagatattgttgtcgaatgggagtctaatggtcagcctgagaacaattacaagactacgccacccgttctggattcagacggatctttcttcctctacagcagattgacggtagacaaaagccgctggcaagagggcaatgtcttcagttgttctgtaatgcacgaagccctccataatcactacacgcagaaatctctgagcttgtctcttgggaaa

SEQ ID NO: 652 - DNA, 1146 bp, Artificial Sequence
  source: /note="Description of Artificial Sequence: Synthetic polynucleotide"
gcccctacgtcctcctcaactaaaaagacgcaacttcagcttgagcatcttcttctcgaccttcagatgattttgaacggaatcaataattacaaaaatcctaaacttactagaatgctcacgtttaagttttatatgccaaaaaaggccactgagttgaaacaccttcaatgcttggaggaggaacttaaaccacttgaggaagccttgaatcttgctccgtccaaaaactttcatttgcggccacgagatctgataagcctgatcaacgtgatcgtcctggaactgaaaggaagcgaaacgacgtttatgtgcgaatatgcagacgaaactgcgacaatcgttgaatttctcaatcgatggatcacttttagccaatctatcatcagcacgttgactggtggtggaggatcgggaggtggaggatctggaggaggaggatcgggtggaggaggatccgaaagtaagtatggccctccttgccctccgtgccctgcacctgagttcctcggcggtccttcagtgtttttgtttccacccaaacctaaagacacccttatgatctctcgaacacctgaagtaacctgtgtagttgttgatgtctcacaggaagatccggaggttcaatttaattggtacgtcgatggtgttgaagtgcataatgcgaagactaagccgagagaggaacagttcaattccacttatcgcgtggtttcagtccttcaggtcttgcacgtggattggcttaacggaaaggaatataagtgcaaggtaagtaataaagggcttccatcaagcattgaaaaaaccataagtaaagcaaaaggacaaccgagggagccccaagtctacacgcttcctccttctcaggaggagatgaccaaaaaccaggtaagtttgacgtgtttggtaaaggggttttatccctcagatattgttgtcgaatgggagtctaatggtcagcctgagaacaattacaagactacgccacccgttctggattcagacggatctttcttcctctacagcagattgacggtagacaaaagccgctggcaagagggcaatgtcttcagttgttctgtaatgcacgaagccctccataatcactacacgcagaaatctctgagcttgtctcttgggaaa

SEQ ID NO: 653 - DNA, 1146 bp, Artificial Sequence
  source: /note="Description of Artificial Sequence: Synthetic polynucleotide"
gcccctacgtcctcctcaactaaaaagacgcaacttcagcttgagcatcttcttctcgaccttcagatgattttgaacggaatcaataattacaaaaatcctaaacttactagaatgctcacgtttaagttttatatgccaaaaaaggccactgagttgaaacaccttcaatgcttggaggaggaacttaaaccacttgaggaagccttgaatcttgctccgtccaaaaactttcatttgcggccacgagatctgataagcagcatcaacgtgatcgtcctggaactgaaaggaagcgaaacgacgtttatgtgcgaatatgcagacgaaactgcgacaatcgttgaatttctcaatcgatggatcacttttagccaatctatcatcagcacgttgactggtggtggaggatcgggaggtggaggatctggaggaggaggatcgggtggaggaggatccgaaagtaagtatggccctccttgccctccgtgccctgcacctgagttcctcggcggtccttcagtgtttttgtttccacccaaacctaaagacacccttatgatctctcgaacacctgaagtaacctgtgtagttgttgatgtctcacaggaagatccggaggttcaatttaattggtacgtcgatggtgttgaagtgcataatgcgaagactaagccgagagaggaacagttcaattccacttatcgcgtggtttcagtccttcaggtcttgcacgtggattggcttaacggaaaggaatataagtgcaaggtaagtaataaagggcttccatcaagcattgaaaaaaccataagtaaagcaaaaggacaaccgagggagccccaagtctacacgcttcctccttctcaggaggagatgaccaaaaaccaggtaagtttgacgtgtttggtaaaggggttttatccctcagatattgttgtcgaatgggagtctaatggtcagcctgagaacaattacaagactacgccacccgttctggattcagacggatctttcttcctctacagcagattgacggtagacaaaagccgctggcaagagggcaatgtcttcagttgttctgtaatgcacgaagccctccataatcactacacgcagaaatctctgagcttgtctcttgggaaa

SEQ ID NO: 654 - DNA, 1146 bp, Artificial Sequence
  source: /note="Description of Artificial Sequence: Synthetic polynucleotide"
gcccctacgtcctcctcaactaaaaagacgcaacttcagcttgagcatcttcttctcgaccttcagatgattttgaacggaatcaataattacaaaaatcctaaacttactagaatgctcacgtttaagttttatatgccaaaaaaggccactgagttgaaacaccttcaatgcttggaggaggaacttaaaccacttgaggaagccttgaatcttgctccgtccaaaaactttcatttgcggccacgagatctgataagcaacatcaacgtgagcgtcctggaactgaaaggaagcgaaacgacgtttatgtgcgaatatgcagacgaaactgcgacaatcgttgaatttctcaatcgatggatcacttttagccaatctatcatcagcacgttgactggtggtggaggatcgggaggtggaggatctggaggaggaggatcgggtggaggaggatccgaaagtaagtatggccctccttgccctccgtgccctgcacctgagttcctcggcggtccttcagtgtttttgtttccacccaaacctaaagacacccttatgatctctcgaacacctgaagtaacctgtgtagttgttgatgtctcacaggaagatccggaggttcaatttaattggtacgtcgatggtgttgaagtgcataatgcgaagactaagccgagagaggaacagttcaattccacttatcgcgtggtttcagtccttcaggtcttgcacgtggattggcttaacggaaaggaatataagtgcaaggtaagtaataaagggcttccatcaagcattgaaaaaaccataagtaaagcaaaaggacaaccgagggagccccaagtctacacgcttcctccttctcaggaggagatgaccaaaaaccaggtaagtttgacgtgtttggtaaaggggttttatccctcagatattgttgtcgaatgggagtctaatggtcagcctgagaacaattacaagactacgccacccgttctggattcagacggatctttcttcctctacagcagattgacggtagacaaaagccgctggcaagagggcaatgtcttcagttgttctgtaatgcacgaagccctccataatcactacacgcagaaatctctgagcttgtctcttgggaaa

SEQ ID NO: 655 - DNA, 1146 bp, Artificial Sequence
  source: /note="Description of Artificial Sequence: Synthetic polynucleotide"
gcccctacgtcctcctcaactaaaaagacgcaacttcagcttgagcatcttcttctcgaccttcagatgattttgaacggaatcaataattacaaaaatcctgaacttactagaatgctcacgtttaagttttatatgccaaaaaaggccactgagttgaaacaccttcaatgcttggaggaggaacttaaaccacttgaggaagccttgaatcttgctccgtccaaaaactttcatttgcggccacgagatctgataagcaacatcaacgtgatcgtcctggaactgaaaggaagcgaaacgacgtttatgtgcgaatatgcagacgaaactgcgacaatcgttgaatttctcaatcgatggatcacttttagccaatctatcatcagcacgttgactggtggtggaggatcgggaggtggaggatctggaggaggaggatcgggtggaggaggatccgaaagtaagtatggccctccttgccctccgtgccctgcacctgagttcctcggcggtccttcagtgtttttgtttccacccaaacctaaagacacccttatgatctctcgaacacctgaagtaacctgtgtagttgttgatgtctcacaggaagatccggaggttcaatttaattggtacgtcgatggtgttgaagtgcataatgcgaagactaagccgagagaggaacagttcaattccacttatcgcgtggtttcagtccttcaggtcttgcacgtggattggcttaacggaaaggaatataagtgcaaggtaagtaataaagggcttccatcaagcattgaaaaaaccataagtaaagcaaaaggacaaccgagggagccccaagtctacacgcttcctccttctcaggaggagatgaccaaaaaccaggtaagtttgacgtgtttggtaaaggggttttatccctcagatattgttgtcgaatgggagtctaatggtcagcctgagaacaattacaagactacgccacccgttctggattcagacggatctttcttcctctacagcagattgacggtagacaaaagccgctggcaagagggcaatgtcttcagttgttctgtaatgcacgaagccctccataatcactacacgcagaaatctctgagcttgtctcttgggaaa

SEQ ID NO: 656 - DNA, 1146 bp, Artificial Sequence
  source: /note="Description of Artificial Sequence: Synthetic polynucleotide"
gcccctacgtcctcctcaactaaaaagacgcaacttcagcttgagaaccttcttctcgaccttcagatgattttgaacggaatcaataattacaaaaatcctgaacttactagaatgctcacgtttaagttttatatgccaaaaaaggccactgagttgaaacaccttcaatgcttggaggaggaacttaaaccacttgaggaagccttgaatcttgctccgtccaaaaactttcatttgcggccacgagatctgataagcaacatcaacgtgatcgtcctggaactgaaaggaagcgaaacgacgtttatgtgcgaatatgcagacgaaactgcgacaatcgttgaatttctcaatcgatggatcacttttagccaatctatcatcagcacgttgactggtggtggaggatcgggaggtggaggatctggaggaggaggatcgggtggaggaggatccgaaagtaagtatggccctccttgccctccgtgccctgcacctgagttcctcggcggtccttcagtgtttttgtttccacccaaacctaaagacacccttatgatctctcgaacacctgaagtaacctgtgtagttgttgatgtctcacaggaagatccggaggttcaatttaattggtacgtcgatggtgttgaagtgcataatgcgaagactaagccgagagaggaacagttcaattccacttatcgcgtggtttcagtccttcaggtcttgcacgtggattggcttaacggaaaggaatataagtgcaaggtaagtaataaagggcttccatcaagcattgaaaaaaccataagtaaagcaaaaggacaaccgagggagccccaagtctacacgcttcctccttctcaggaggagatgaccaaaaaccaggtaagtttgacgtgtttggtaaaggggttttatccctcagatattgttgtcgaatgggagtctaatggtcagcctgagaacaattacaagactacgccacccgttctggattcagacggatctttcttcctctacagcagattgacggtagacaaaagccgctggcaagagggcaatgtcttcagttgttctgtaatgcacgaagccctccataatcactacacgcagaaatctctgagcttgtctcttgggaaa

SEQ ID NO: 657 - DNA, 1146 bp, Artificial Sequence
  source: /note="Description of Artificial Sequence: Synthetic polynucleotide"
gcccctacgtcctcctcaactaaaaagacgcaacttcagcttgagctgcttcttctcgaccttcagatgattttgaacggaatcaataattacaaaaatcctgaacttactagaatgctcacgtttaagttttatatgccaaaaaaggccactgagttgaaacaccttcaatgcttggaggaggaacttaaaccacttgaggaagccttgaatcttgctccgtccaaaaactttcatttgcggccacgagatctgataagcaacatcaacgtgatcgtcctggaactgaaaggaagcgaaacgacgtttatgtgcgaatatgcagacgaaactgcgacaatcgttgaatttctcaatcgatggatcacttttagccaatctatcatcagcacgttgactggtggtggaggatcgggaggtggaggatctggaggaggaggatcgggtggaggaggatccgaaagtaagtatggccctccttgccctccgtgccctgcacctgagttcctcggcggtccttcagtgtttttgtttccacccaaacctaaagacacccttatgatctctcgaacacctgaagtaacctgtgtagttgttgatgtctcacaggaagatccggaggttcaatttaattggtacgtcgatggtgttgaagtgcataatgcgaagactaagccgagagaggaacagttcaattccacttatcgcgtggtttcagtccttcaggtcttgcacgtggattggcttaacggaaaggaatataagtgcaaggtaagtaataaagggcttccatcaagcattgaaaaaaccataagtaaagcaaaaggacaaccgagggagccccaagtctacacgcttcctccttctcaggaggagatgaccaaaaaccaggtaagtttgacgtgtttggtaaaggggttttatccctcagatattgttgtcgaatgggagtctaatggtcagcctgagaacaattacaagactacgccacccgttctggattcagacggatctttcttcctctacagcagattgacggtagacaaaagccgctggcaagagggcaatgtcttcagttgttctgtaatgcacgaagccctccataatcactacacgcagaaatctctgagcttgtctcttgggaaa

SEQ ID NO: 658 - DNA, 1146 bp, Artificial Sequence
  source: /note="Description of Artificial Sequence: Synthetic polynucleotide"
gcccctacgtcctcctcaactaaaaagacgcaacttcagcttgagcatcttcttctcgaccttcagatgattttgaacggaatcaataattacaaaaatcctgaacttactagaatgctcacgtttaagttttatatgccaaaaaaggccactgagttgaaacaccttcaatgcttggaggaggaacttaaaccacttgaggaagccttgaatcttgctccgtccaaaaactttcatttgcggccacgagtgctgataagcaacatcaacgtgatcgtcctggaactgaaaggaagcgaaacgacgtttatgtgcgaatatgcagacgaaactgcgacaatcgttgaatttctcaatcgatggatcacttttagccaatctatcatcagcacgttgactggtggtggaggatcgggaggtggaggatctggaggaggaggatcgggtggaggaggatccgaaagtaagtatggccctccttgccctccgtgccctgcacctgagttcctcggcggtccttcagtgtttttgtttccacccaaacctaaagacacccttatgatctctcgaacacctgaagtaacctgtgtagttgttgatgtctcacaggaagatccggaggttcaatttaattggtacgtcgatggtgttgaagtgcataatgcgaagactaagccgagagaggaacagttcaattccacttatcgcgtggtttcagtccttcaggtcttgcacgtggattggcttaacggaaaggaatataagtgcaaggtaagtaataaagggcttccatcaagcattgaaaaaaccataagtaaagcaaaaggacaaccgagggagccccaagtctacacgcttcctccttctcaggaggagatgaccaaaaaccaggtaagtttgacgtgtttggtaaaggggttttatccctcagatattgttgtcgaatgggagtctaatggtcagcctgagaacaattacaagactacgccacccgttctggattcagacggatctttcttcctctacagcagattgacggtagacaaaagccgctggcaagagggcaatgtcttcagttgttctgtaatgcacgaagccctccataatcactacacgcagaaatctctgagcttgtctcttgggaaa

SEQ ID NO: 659 - DNA, 1146 bp, Artificial Sequence
  source: /note="Description of Artificial Sequence: Synthetic polynucleotide"
gcccctacgtcctcctcaactaaaaagacgcaacttcagcttgagcatcttcttctcgaccttcagatgattttgaacggaatcaataattacaaaaatcctgaacttactagaatgctcacgtttaagttttatatgccaaaaaaggccactgagttgaaacaccttcaatgcttggaggaggaacttaaaccacttgaggaagccttgaatcttgctccgtccaaaaactttcatttgcggccacgagatctgataagcaacatcaacgtgagcgtcctggaactgaaaggaagcgaaacgacgtttatgtgcgaatatgcagacgaaactgcgacaatcgttgaatttctcaatcgatggatcacttttagccaatctatcatcagcacgttgactggtggtggaggatcgggaggtggaggatctggaggaggaggatcgggtggaggaggatccgaaagtaagtatggccctccttgccctccgtgccctgcacctgagttcctcggcggtccttcagtgtttttgtttccacccaaacctaaagacacccttatgatctctcgaacacctgaagtaacctgtgtagttgttgatgtctcacaggaagatccggaggttcaatttaattggtacgtcgatggtgttgaagtgcataatgcgaagactaagccgagagaggaacagttcaattccacttatcgcgtggtttcagtccttcaggtcttgcacgtggattggcttaacggaaaggaatataagtgcaaggtaagtaataaagggcttccatcaagcattgaaaaaaccataagtaaagcaaaaggacaaccgagggagccccaagtctacacgcttcctccttctcaggaggagatgaccaaaaaccaggtaagtttgacgtgtttggtaaaggggttttatccctcagatattgttgtcgaatgggagtctaatggtcagcctgagaacaattacaagactacgccacccgttctggattcagacggatctttcttcctctacagcagattgacggtagacaaaagccgctggcaagagggcaatgtcttcagttgttctgtaatgcacgaagccctccataatcactacacgcagaaatctctgagcttgtctcttgggaaa

SEQ ID NO: 660 - DNA, 1146 bp, Artificial Sequence
  source: /note="Description of Artificial Sequence: Synthetic polynucleotide"
gcccctacgtcctcctcaactaaaaagacgcaacttcagcttgagcatcttcttctcgaccttcagatgattttgaacggaatcaataattacaaaaatcctaaacttactcagatgctcacgtttaagttttatatgccaaaaaaggccactgagttgaaacaccttcaatgcttggaggaggaacttaaaccacttgaggaagccttgaatcttgctccgtccaaaaactttcatttgcggccacgagatctgataagcaacatcaacgtgatcgtcctggaactgaaaggaagcgaaacgacgtttatgtgcgaatatgcagacgaaactgcgacaatcgttgaatttctcaatcgatggatcacttttagccaatctatcatcagcacgttgactggtggtggaggatcgggaggtggaggatctggaggaggaggatcgggtggaggaggatccgaaagtaagtatggccctccttgccctccgtgccctgcacctgagttcctcggcggtccttcagtgtttttgtttccacccaaacctaaagacacccttatgatctctcgaacacctgaagtaacctgtgtagttgttgatgtctcacaggaagatccggaggttcaatttaattggtacgtcgatggtgttgaagtgcataatgcgaagactaagccgagagaggaacagttcaattccacttatcgcgtggtttcagtccttcaggtcttgcacgtggattggcttaacggaaaggaatataagtgcaaggtaagtaataaagggcttccatcaagcattgaaaaaaccataagtaaagcaaaaggacaaccgagggagccccaagtctacacgcttcctccttctcaggaggagatgaccaaaaaccaggtaagtttgacgtgtttggtaaaggggttttatccctcagatattgttgtcgaatgggagtctaatggtcagcctgagaacaattacaagactacgccacccgttctggattcagacggatctttcttcctctacagcagattgacggtagacaaaagccgctggcaagagggcaatgtcttcagttgttctgtaatgcacgaagccctccataatcactacacgcagaaatctctgagcttgtctcttgggaaa

SEQ ID NO: 661 - DNA, 1146 bp, Artificial Sequence
  source: /note="Description of Artificial Sequence: Synthetic polynucleotide"
gcccctacgtcctcctcaactaaaaagacgcaacttcagcttgagaaccttcttctcgaccttcagatgattttgaacggaatcaataattacaaaaatcctaaacttactcagatgctcacgtttaagttttatatgccaaaaaaggccactgagttgaaacaccttcaatgcttggaggaggaacttaaaccacttgaggaagccttgaatcttgctccgtccaaaaactttcatttgcggccacgagatctgataagcaacatcaacgtgatcgtcctggaactgaaaggaagcgaaacgacgtttatgtgcgaatatgcagacgaaactgcgacaatcgttgaatttctcaatcgatggatcacttttagccaatctatcatcagcacgttgactggtggtggaggatcgggaggtggaggatctggaggaggaggatcgggtggaggaggatccgaaagtaagtatggccctccttgccctccgtgccctgcacctgagttcctcggcggtccttcagtgtttttgtttccacccaaacctaaagacacccttatgatctctcgaacacctgaagtaacctgtgtagttgttgatgtctcacaggaagatccggaggttcaatttaattggtacgtcgatggtgttgaagtgcataatgcgaagactaagccgagagaggaacagttcaattccacttatcgcgtggtttcagtccttcaggtcttgcacgtggattggcttaacggaaaggaatataagtgcaaggtaagtaataaagggcttccatcaagcattgaaaaaaccataagtaaagcaaaaggacaaccgagggagccccaagtctacacgcttcctccttctcaggaggagatgaccaaaaaccaggtaagtttgacgtgtttggtaaaggggttttatccctcagatattgttgtcgaatgggagtctaatggtcagcctgagaacaattacaagactacgccacccgttctggattcagacggatctttcttcctctacagcagattgacggtagacaaaagccgctggcaagagggcaatgtcttcagttgttctgtaatgcacgaagccctccataatcactacacgcagaaatctctgagcttgtctcttgggaaa

SEQ ID NO: 662 - DNA, 1146 bp, Artificial Sequence
  source: /note="Description of Artificial Sequence: Synthetic polynucleotide"
gcccctacgtcctcctcaactaaaaagacgcaacttcagcttgagctgcttcttctcgaccttcagatgattttgaacggaatcaataattacaaaaatcctaaacttactcagatgctcacgtttaagttttatatgccaaaaaaggccactgagttgaaacaccttcaatgcttggaggaggaacttaaaccacttgaggaagccttgaatcttgctccgtccaaaaactttcatttgcggccacgagatctgataagcaacatcaacgtgatcgtcctggaactgaaaggaagcgaaacgacgtttatgtgcgaatatgcagacgaaactgcgacaatcgttgaatttctcaatcgatggatcacttttagccaatctatcatcagcacgttgactggtggtggaggatcgggaggtggaggatctggaggaggaggatcgggtggaggaggatccgaaagtaagtatggccctccttgccctccgtgccctgcacctgagttcctcggcggtccttcagtgtttttgtttccacccaaacctaaagacacccttatgatctctcgaacacctgaagtaacctgtgtagttgttgatgtctcacaggaagatccggaggttcaatttaattggtacgtcgatggtgttgaagtgcataatgcgaagactaagccgagagaggaacagttcaattccacttatcgcgtggtttcagtccttcaggtcttgcacgtggattggcttaacggaaaggaatataagtgcaaggtaagtaataaagggcttccatcaagcattgaaaaaaccataagtaaagcaaaaggacaaccgagggagccccaagtctacacgcttcctccttctcaggaggagatgaccaaaaaccaggtaagtttgacgtgtttggtaaaggggttttatccctcagatattgttgtcgaatgggagtctaatggtcagcctgagaacaattacaagactacgccacccgttctggattcagacggatctttcttcctctacagcagattgacggtagacaaaagccgctggcaagagggcaatgtcttcagttgttctgtaatgcacgaagccctccataatcactacacgcagaaatctctgagcttgtctcttgggaaa

SEQ ID NO: 663 - DNA, 1146 bp, Artificial Sequence
  source: /note="Description of Artificial Sequence: Synthetic polynucleotide"
gcccctacgtcctcctcaactaaaaagacgcaacttcagcttgagcatcttcttctcgaccttcagatgattttgaacggaatcaataattacaaaaatcctaaacttactcagatgctcacgtttaagttttatatgccaaaaaaggccactgagttgaaacaccttcaatgcttggaggaggaacttaaaccacttgaggaagccttgaatcttgctccgtccaaaaactttcatttgcggccacgagtgctgataagcaacatcaacgtgatcgtcctggaactgaaaggaagcgaaacgacgtttatgtgcgaatatgcagacgaaactgcgacaatcgttgaatttctcaatcgatggatcacttttagccaatctatcatcagcacgttgactggtggtggaggatcgggaggtggaggatctggaggaggaggatcgggtggaggaggatccgaaagtaagtatggccctccttgccctccgtgccctgcacctgagttcctcggcggtccttcagtgtttttgtttccacccaaacctaaagacacccttatgatctctcgaacacctgaagtaacctgtgtagttgttgatgtctcacaggaagatccggaggttcaatttaattggtacgtcgatggtgttgaagtgcataatgcgaagactaagccgagagaggaacagttcaattccacttatcgcgtggtttcagtccttcaggtcttgcacgtggattggcttaacggaaaggaatataagtgcaaggtaagtaataaagggcttccatcaagcattgaaaaaaccataagtaaagcaaaaggacaaccgagggagccccaagtctacacgcttcctccttctcaggaggagatgaccaaaaaccaggtaagtttgacgtgtttggtaaaggggttttatccctcagatattgttgtcgaatgggagtctaatggtcagcctgagaacaattacaagactacgccacccgttctggattcagacggatctttcttcctctacagcagattgacggtagacaaaagccgctggcaagagggcaatgtcttcagttgttctgtaatgcacgaagccctccataatcactacacgcagaaatctctgagcttgtctcttgggaaa

SEQ ID NO: 664 - DNA, 1146 bp, Artificial Sequence
  source: /note="Description of Artificial Sequence: Synthetic polynucleotide"
gcccctacgtcctcctcaactaaaaagacgcaacttcagcttgagcatcttcttctcgaccttcagatgattttgaacggaatcaataattacaaaaatcctaaacttactcagatgctcacgtttaagttttatatgccaaaaaaggccactgagttgaaacaccttcaatgcttggaggaggaacttaaaccacttgaggaagccttgaatcttgctccgtccaaaaactttcatttgcggccacgagatctgataagcaacatcaacgtgagcgtcctggaactgaaaggaagcgaaacgacgtttatgtgcgaatatgcagacgaaactgcgacaatcgttgaatttctcaatcgatggatcacttttagccaatctatcatcagcacgttgactggtggtggaggatcgggaggtggaggatctggaggaggaggatcgggtggaggaggatccgaaagtaagtatggccctccttgccctccgtgccctgcacctgagttcctcggcggtccttcagtgtttttgtttccacccaaacctaaagacacccttatgatctctcgaacacctgaagtaacctgtgtagttgttgatgtctcacaggaagatccggaggttcaatttaattggtacgtcgatggtgttgaagtgcataatgcgaagactaagccgagagaggaacagttcaattccacttatcgcgtggtttcagtccttcaggtcttgcacgtggattggcttaacggaaaggaatataagtgcaaggtaagtaataaagggcttccatcaagcattgaaaaaaccataagtaaagcaaaaggacaaccgagggagccccaagtctacacgcttcctccttctcaggaggagatgaccaaaaaccaggtaagtttgacgtgtttggtaaaggggttttatccctcagatattgttgtcgaatgggagtctaatggtcagcctgagaacaattacaagactacgccacccgttctggattcagacggatctttcttcctctacagcagattgacggtagacaaaagccgctggcaagagggcaatgtcttcagttgttctgtaatgcacgaagccctccataatcactacacgcagaaatctctgagcttgtctcttgggaaa

SEQ ID NO: 665 - DNA, 1146 bp, Artificial Sequence
  source: /note="Description of Artificial Sequence: Synthetic polynucleotide"
gcccctacgtcctcctcaactaaaaagacgcaacttcagcttgagcatcttcttctcgaccttcagatgattttgaacggaatcaataattacaaaaatcctaaacttactaacatgctcacgtttaagttttatatgccaaaaaaggccactgagttgaaacaccttcaatgcttggaggaggaacttaaaccacttgaggaagccttgaatcttgctccgtccaaaaactttcatttgcggccacgagatctgataagcaacatcaacgtgatcgtcctggaactgaaaggaagcgaaacgacgtttatgtgcgaatatgcagacgaaactgcgacaatcgttgaatttctcaatcgatggatcacttttagccaatctatcatcagcacgttgactggtggtggaggatcgggaggtggaggatctggaggaggaggatcgggtggaggaggatccgaaagtaagtatggccctccttgccctccgtgccctgcacctgagttcctcggcggtccttcagtgtttttgtttccacccaaacctaaagacacccttatgatctctcgaacacctgaagtaacctgtgtagttgttgatgtctcacaggaagatccggaggttcaatttaattggtacgtcgatggtgttgaagtgcataatgcgaagactaagccgagagaggaacagttcaattccacttatcgcgtggtttcagtccttcaggtcttgcacgtggattggcttaacggaaaggaatataagtgcaaggtaagtaataaagggcttccatcaagcattgaaaaaaccataagtaaagcaaaaggacaaccgagggagccccaagtctacacgcttcctccttctcaggaggagatgaccaaaaaccaggtaagtttgacgtgtttggtaaaggggttttatccctcagatattgttgtcgaatgggagtctaatggtcagcctgagaacaattacaagactacgccacccgttctggattcagacggatctttcttcctctacagcagattgacggtagacaaaagccgctggcaagagggcaatgtcttcagttgttctgtaatgcacgaagccctccataatcactacacgcagaaatctctgagcttgtctcttgggaaa

SEQ ID NO: 666 - DNA, 1146 bp, Artificial Sequence
  source: /note="Description of Artificial Sequence: Synthetic polynucleotide"
gcccctacgtcctcctcaactaaaaagacgcaacttcagcttgagaaccttcttctcgaccttcagatgattttgaacggaatcaataattacaaaaatcctaaacttactaacatgctcacgtttaagttttatatgccaaaaaaggccactgagttgaaacaccttcaatgcttggaggaggaacttaaaccacttgaggaagccttgaatcttgctccgtccaaaaactttcatttgcggccacgagatctgataagcaacatcaacgtgatcgtcctggaactgaaaggaagcgaaacgacgtttatgtgcgaatatgcagacgaaactgcgacaatcgttgaatttctcaatcgatggatcacttttagccaatctatcatcagcacgttgactggtggtggaggatcgggaggtggaggatctggaggaggaggatcgggtggaggaggatccgaaagtaagtatggccctccttgccctccgtgccctgcacctgagttcctcggcggtccttcagtgtttttgtttccacccaaacctaaagacacccttatgatctctcgaacacctgaagtaacctgtgtagttgttgatgtctcacaggaagatccggaggttcaatttaattggtacgtcgatggtgttgaagtgcataatgcgaagactaagccgagagaggaacagttcaattccacttatcgcgtggtttcagtccttcaggtcttgcacgtggattggcttaacggaaaggaatataagtgcaaggtaagtaataaagggcttccatcaagcattgaaaaaaccataagtaaagcaaaaggacaaccgagggagccccaagtctacacgcttcctccttctcaggaggagatgaccaaaaaccaggtaagtttgacgtgtttggtaaaggggttttatccctcagatattgttgtcgaatgggagtctaatggtcagcctgagaacaattacaagactacgccacccgttctggattcagacggatctttcttcctctacagcagattgacggtagacaaaagccgctggcaagagggcaatgtcttcagttgttctgtaatgcacgaagccctccataatcactacacgcagaaatctctgagcttgtctcttgggaaa

SEQ ID NO: 667 - DNA, 1146 bp, Artificial Sequence
  source: /note="Description of Artificial Sequence: Synthetic polynucleotide"
gcccctacgtcctcctcaactaaaaagacgcaacttcagcttgagttgcttcttctcgaccttcagatgattttgaacggaatcaataattacaaaaatcctaaacttactaacatgctcacgtttaagttttatatgccaaaaaaggccactgagttgaaacaccttcaatgcttggaggaggaacttaaaccacttgaggaagccttgaatcttgctccgtccaaaaactttcatttgcggccacgagatctgataagcaacatcaacgtgatcgtcctggaactgaaaggaagcgaaacgacgtttatgtgcgaatatgcagacgaaactgcgacaatcgttgaatttctcaatcgatggatcacttttagccaatctatcatcagcacgttgactggtggtggaggatcgggaggtggaggatctggaggaggaggatcgggtggaggaggatccgaaagtaagtatggccctccttgccctccgtgccctgcacctgagttcctcggcggtccttcagtgtttttgtttccacccaaacctaaagacacccttatgatctctcgaacacctgaagtaacctgtgtagttgttgatgtctcacaggaagatccggaggttcaatttaattggtacgtcgatggtgttgaagtgcataatgcgaagactaagccgagagaggaacagttcaattccacttatcgcgtggtttcagtccttcaggtcttgcacgtggattggcttaacggaaaggaatataagtgcaaggtaagtaataaagggcttccatcaagcattgaaaaaaccataagtaaagcaaaaggacaaccgagggagccccaagtctacacgcttcctccttctcaggaggagatgaccaaaaaccaggtaagtttgacgtgtttggtaaaggggttttatccctcagatattgttgtcgaatgggagtctaatggtcagcctgagaacaattacaagactacgccacccgttctggattcagacggatctttcttcctctacagcagattgacggtagacaaaagccgctggcaagagggcaatgtcttcagttgttctgtaatgcacgaagccctccataatcactacacgcagaaatctctgagcttgtctcttgggaaa

SEQ ID NO: 668 - DNA, 1146 bp, Artificial Sequence
  source: /note="Description of Artificial Sequence: Synthetic polynucleotide"
gcccctacgtcctcctcaactaaaaagacgcaacttcagcttgagcatcttcttctcgaccttcagatgattttgaacggaatcaataattacaaaaatcctaaacttactaacatgctcacgtttaagttttatatgccaaaaaaggccactgagttgaaacaccttcaatgcttggaggaggaacttaaaccacttgaggaagccttgaatcttgctccgtccaaaaactttcatttgcggccacgagtcctgataagcaacatcaacgtgatcgtcctggaactgaaaggaagcgaaacgacgtttatgtgcgaatatgcagacgaaactgcgacaatcgttgaatttctcaatcgatggatcacttttagccaatctatcatcagcacgttgactggtggtggaggatcgggaggtggaggatctggaggaggaggatcgggtggaggaggatccgaaagtaagtatggccctccttgccctccgtgccctgcacctgagttcctcggcggtccttcagtgtttttgtttccacccaaacctaaagacacccttatgatctctcgaacacctgaagtaacctgtgtagttgttgatgtctcacaggaagatccggaggttcaatttaattggtacgtcgatggtgttgaagtgcataatgcgaagactaagccgagagaggaacagttcaattccacttatcgcgtggtttcagtccttcaggtcttgcacgtggattggcttaacggaaaggaatataagtgcaaggtaagtaataaagggcttccatcaagcattgaaaaaaccataagtaaagcaaaaggacaaccgagggagccccaagtctacacgcttcctccttctcaggaggagatgaccaaaaaccaggtaagtttgacgtgtttggtaaaggggttttatccctcagatattgttgtcgaatgggagtctaatggtcagcctgagaacaattacaagactacgccacccgttctggattcagacggatctttcttcctctacagcagattgacggtagacaaaagccgctggcaagagggcaatgtcttcagttgttctgtaatgcacgaagccctccataatcactacacgcagaaatctctgagcttgtctcttgggaaa

SEQ ID NO: 669 - DNA, 1146 bp, Artificial Sequence
  source: /note="Description of Artificial Sequence: Synthetic polynucleotide"
gcccctacgtcctcctcaactaaaaagacgcaacttcagcttgagcatcttcttctcgaccttcagatgattttgaacggaatcaataattacaaaaatcctaaacttactaacatgctcacgtttaagttttatatgccaaaaaaggccactgagttgaaacaccttcaatgcttggaggaggaacttaaaccacttgaggaagccttgaatcttgctccgtccaaaaactttcatttgcggccacgagatctgataagcaacatcaacgtgagcgtcctggaactgaaaggaagcgaaacgacgtttatgtgcgaatatgcagacgaaactgcgacaatcgttgaatttctcaatcgatggatcacttttagccaatctatcatcagcacgttgactggtggtggaggatcgggaggtggaggatctggaggaggaggatcgggtggaggaggatccgaaagtaagtatggccctccttgccctccgtgccctgcacctgagttcctcggcggtccttcagtgtttttgtttccacccaaacctaaagacacccttatgatctctcgaacacctgaagtaacctgtgtagttgttgatgtctcacaggaagatccggaggttcaatttaattggtacgtcgatggtgttgaagtgcataatgcgaagactaagccgagagaggaacagttcaattccacttatcgcgtggtttcagtccttcaggtcttgcacgtggattggcttaacggaaaggaatataagtgcaaggtaagtaataaagggcttccatcaagcattgaaaaaaccataagtaaagcaaaaggacaaccgagggagccccaagtctacacgcttcctccttctcaggaggagatgaccaaaaaccaggtaagtttgacgtgtttggtaaaggggttttatccctcagatattgttgtcgaatgggagtctaatggtcagcctgagaacaattacaagactacgccacccgttctggattcagacggatctttcttcctctacagcagattgacggtagacaaaagccgctggcaagagggcaatgtcttcagttgttctgtaatgcacgaagccctccataatcactacacgcagaaatctctgagcttgtctcttgggaaa

SEQ ID NO: 670 - DNA, 1146 bp, Artificial Sequence
  source: /note="Description of Artificial Sequence: Synthetic polynucleotide"
gcccctacgtcctcctcaactaaaaagacgcaacttcagcttgagcatcttcttctcgaccttcagatgattttgaacggaatcaataattacaaaaatcctaaacttactgaaatgctcacgtttaagttttatatgccaaaaaaggccactgagttgaaacaccttcaatgcttggaggaggaacttaaaccacttgaggaagccttgaatcttgctccgtccaaaaactttcatttgcggccacgagatctgataagcaacatcaacgtgatcgtcctggaactgaaaggaagcgaaacgacgtttatgtgcgaatatgcagacgaaactgcgacaatcgttgaatttctcaatcgatggatcacttttagccaatctatcatcagcacgttgactggtggtggaggatcgggaggtggaggatctggaggaggaggatcgggtggaggaggatccgaaagtaagtatggccctccttgccctccgtgccctgcacctgagttcctcggcggtccttcagtgtttttgtttccacccaaacctaaagacacccttatgatctctcgaacacctgaagtaacctgtgtagttgttgatgtctcacaggaagatccggaggttcaatttaattggtacgtcgatggtgttgaagtgcataatgcgaagactaagccgagagaggaacagttcaattccacttatcgcgtggtttcagtccttcaggtcttgcacgtggattggcttaacggaaaggaatataagtgcaaggtaagtaataaagggcttccatcaagcattgaaaaaaccataagtaaagcaaaaggacaaccgagggagccccaagtctacacgcttcctccttctcaggaggagatgaccaaaaaccaggtaagtttgacgtgtttggtaaaggggttttatccctcagatattgttgtcgaatgggagtctaatggtcagcctgagaacaattacaagactacgccacccgttctggattcagacggatctttcttcctctacagcagattgacggtagacaaaagccgctggcaagagggcaatgtcttcagttgttctgtaatgcacgaagccctccataatcactacacgcagaaatctctgagcttgtctcttgggaaa

SEQ ID NO: 671 - DNA, 1146 bp, Artificial Sequence
  source: /note="Description of Artificial Sequence: Synthetic polynucleotide"
gcccctacgtcctcctcaactaaaaagacgcaacttcagcttgagcatcttcttctcgaccttcagatgattttgaacggaatcaataattacaaaaatcctaaacttactagaatgctcacgaagaagttttatatgccaaaaaaggccactgagttgaaacaccttcaatgcttggaggaggaacttaaaccacttgaggaagccttgaatcttgctccgtccaaaaactttcatttgcggccacgagatctgataagcaacatcaacgtgatcgtcctggaactgaaaggaagcgaaacgacgtttatgtgcgaatatgcagacgaaactgcgacaatcgttgaatttctcaatcgatggatcacttttagccaatctatcatcagcacgttgactggtggtggaggatcgggaggtggaggatctggaggaggaggatcgggtggaggaggatccgaaagtaagtatggccctccttgccctccgtgccctgcacctgagttcctcggcggtccttcagtgtttttgtttccacccaaacctaaagacacccttatgatctctcgaacacctgaagtaacctgtgtagttgttgatgtctcacaggaagatccggaggttcaatttaattggtacgtcgatggtgttgaagtgcataatgcgaagactaagccgagagaggaacagttcaattccacttatcgcgtggtttcagtccttcaggtcttgcacgtggattggcttaacggaaaggaatataagtgcaaggtaagtaataaagggcttccatcaagcattgaaaaaaccataagtaaagcaaaaggacaaccgagggagccccaagtctacacgcttcctccttctcaggaggagatgaccaaaaaccaggtaagtttgacgtgtttggtaaaggggttttatccctcagatattgttgtcgaatgggagtctaatggtcagcctgagaacaattacaagactacgccacccgttctggattcagacggatctttcttcctctacagcagattgacggtagacaaaagccgctggcaagagggcaatgtcttcagttgttctgtaatgcacgaagccctccataatcactacacgcagaaatctctgagcttgtctcttgggaaa

SEQ ID NO: 672 - DNA, 1146 bp, Artificial Sequence
  source: /note="Description of Artificial Sequence: Synthetic polynucleotide"
gcccctacgtcctcctcaactaaaaagacgcaacttcagcttgagcatcttcttctcgaccttcagatgattttgaacggaatcaataattacaaaaatcctaaacttactagaatgctcacgcagaagttttatatgccaaaaaaggccactgagttgaaacaccttcaatgcttggaggaggaacttaaaccacttgaggaagccttgaatcttgctccgtccaaaaactttcatttgcggccacgagatctgataagcaacatcaacgtgatcgtcctggaactgaaaggaagcgaaacgacgtttatgtgcgaatatgcagacgaaactgcgacaatcgttgaatttctcaatcgatggatcacttttagccaatctatcatcagcacgttgactggtggtggaggatcgggaggtggaggatctggaggaggaggatcgggtggaggaggatccgaaagtaagtatggccctccttgccctccgtgccctgcacctgagttcctcggcggtccttcagtgtttttgtttccacccaaacctaaagacacccttatgatctctcgaacacctgaagtaacctgtgtagttgttgatgtctcacaggaagatccggaggttcaatttaattggtacgtcgatggtgttgaagtgcataatgcgaagactaagccgagagaggaacagttcaattccacttatcgcgtggtttcagtccttcaggtcttgcacgtggattggcttaacggaaaggaatataagtgcaaggtaagtaataaagggcttccatcaagcattgaaaaaaccataagtaaagcaaaaggacaaccgagggagccccaagtctacacgcttcctccttctcaggaggagatgaccaaaaaccaggtaagtttgacgtgtttggtaaaggggttttatccctcagatattgttgtcgaatgggagtctaatggtcagcctgagaacaattacaagactacgccacccgttctggattcagacggatctttcttcctctacagcagattgacggtagacaaaagccgctggcaagagggcaatgtcttcagttgttctgtaatgcacgaagccctccataatcactacacgcagaaatctctgagcttgtctcttgggaaa

SEQ ID NO: 673 - DNA, 1146 bp, Artificial Sequence
  source: /note="Description of Artificial Sequence: Synthetic polynucleotide"
gcccctacgtcctcctcaactaaaaagacgcaacttcagcttgagcatcttcttctcgaccttcagatgattttgaacggaatcaataattacaaaaatcctaaacttactagaatgctcacggcaaagtttgctatgccaaaaaaggccactgagttgaaacaccttcaatgcttggaggaggaacttaaaccacttgaggaagccttgaatggtgctccgtccaaaaactttcatttgcggccacgagatctgataagcgatatcaacgtgatcgtcctggaactgaaaggaagcgaaacgacgtttatgtgcgaatatgcagacgaaactgcgacaatcgttgaatttctcaatcgatggatcacttttagccaatctatcatcagcacgttgactggtggtggaggatcgggaggtggaggatctggaggaggaggatcgggtggaggaggatccgaaagtaagtatggccctccttgccctccgtgccctgcacctgagttcctcggcggtccttcagtgtttttgtttccacccaaacctaaagacacccttatgatctctcgaacacctgaagtaacctgtgtagttgttgatgtctcacaggaagatccggaggttcaatttaattggtacgtcgatggtgttgaagtgcataatgcgaagactaagccgagagaggaacagttcaattccacttatcgcgtggtttcagtccttcaggtcttgcacgtggattggcttaacggaaaggaatataagtgcaaggtaagtaataaagggcttccatcaagcattgaaaaaaccataagtaaagcaaaaggacaaccgagggagccccaagtctacacgcttcctccttctcaggaggagatgaccaaaaaccaggtaagtttgacgtgtttggtaaaggggttttatccctcagatattgttgtcgaatgggagtctaatggtcagcctgagaacaattacaagactacgccacccgttctggattcagacggatctttcttcctctacagcagattgacggtagacaaaagccgctggcaagagggcaatgtcttcagttgttctgtaatgcacgaagccctccataatcactacacgcagaaatctctgagcttgtctcttgggaaa

SEQ ID NO: 674 - DNA, 1146 bp, Artificial Sequence
  source: /note="Description of Artificial Sequence: Synthetic polynucleotide"
gcccctacgtcctcctcaactaaaaagacgcaacttcagcttgagcatcttcttctcgaccttcagatgattttgaacggaatcaataattacaaaaatcctaaacttactaacatgctcacgtttaagttttatatgccaaaaaaggccactgagttgaaacaccttcaatgcttggaggaggaacttaaaccacttgaggaagccttgaatcttgctccgtccaaaaactttcatttgcggccacgagatctgataaggaacatcaacgtgatcgtcctggaactgaaaggaagcgaaacgacgtttatgtgcgaatatgcagacgaaactgcgacaatcgttgaatttctcaatcgatggatcacttttagccaatctatcatcagcacgttgactggtggtggaggatcgggaggtggaggatctggaggaggaggatcgggtggaggaggatccgaaagtaagtatggccctccttgccctccgtgccctgcacctgagttcctcggcggtccttcagtgtttttgtttccacccaaacctaaagacacccttatgatctctcgaacacctgaagtaacctgtgtagttgttgatgtctcacaggaagatccggaggttcaatttaattggtacgtcgatggtgttgaagtgcataatgcgaagactaagccgagagaggaacagttcaattccacttatcgcgtggtttcagtccttcaggtcttgcacgtggattggcttaacggaaaggaatataagtgcaaggtaagtaataaagggcttccatcaagcattgaaaaaaccataagtaaagcaaaaggacaaccgagggagccccaagtctacacgcttcctccttctcaggaggagatgaccaaaaaccaggtaagtttgacgtgtttggtaaaggggttttatccctcagatattgttgtcgaatgggagtctaatggtcagcctgagaacaattacaagactacgccacccgttctggattcagacggatctttcttcctctacagcagattgacggtagacaaaagccgctggcaagagggcaatgtcttcagttgttctgtaatgcacgaagccctccataatcactacacgcagaaatctctgagcttgtctcttgggaaa

SEQ ID NO: 675 - DNA, 1146 bp, Artificial Sequence
  source: /note="Description of Artificial Sequence: Synthetic polynucleotide"
gcccctacgtcctcctcaactaaaaagacgcaacttcagcttgagaaccttcttctcgaccttcagatgattttgaacggaatcaataattacaaaaatcctaaacttactgaaatgctcacgtttaagttttatatgccaaaaaaggccactgagttgaaacaccttcaatgcttggaggaggaacttaaaccacttgaggaagccttgaatcttgctccgtccaaaaactttcatttgcggccacgagatctgataagcaacatcaacgtgatcgtcctggaactgaaaggaagcgaaacgacgtttatgtgcgaatatgcagacgaaactgcgacaatcgttgaatttctcaatcgatggatcacttttagccaatctatcatcagcacgttgactggtggtggaggatcgggaggtggaggatctggaggaggaggatcgggtggaggaggatccgaaagtaagtatggccctccttgccctccgtgccctgcacctgagttcctcggcggtccttcagtgtttttgtttccacccaaacctaaagacacccttatgatctctcgaacacctgaagtaacctgtgtagttgttgatgtctcacaggaagatccggaggttcaatttaattggtacgtcgatggtgttgaagtgcataatgcgaagactaagccgagagaggaacagttcaattccacttatcgcgtggtttcagtccttcaggtcttgcacgtggattggcttaacggaaaggaatataagtgcaaggtaagtaataaagggcttccatcaagcattgaaaaaaccataagtaaagcaaaaggacaaccgagggagccccaagtctacacgcttcctccttctcaggaggagatgaccaaaaaccaggtaagtttgacgtgtttggtaaaggggttttatccctcagatattgttgtcgaatgggagtctaatggtcagcctgagaacaattacaagactacgccacccgttctggattcagacggatctttcttcctctacagcagattgacggtagacaaaagccgctggcaagagggcaatgtcttcagttgttctgtaatgcacgaagccctccataatcactacacgcagaaatctctgagcttgtctcttgggaaa

SEQ ID NO: 676 - DNA, 1146 bp, Artificial Sequence
  source: /note="Description of Artificial Sequence: Synthetic polynucleotide"
gcccctacgtcctcctcaactaaaaagacgcaacttcagcttgagcatcttcttctcgaccttcagatgattttgaacggaatcaataattacaaaaatcctaaacttactgaaatgctcacgtttaagttttatatgccaaaaaaggccactgagttgaaacaccttcaatgcttggaggaggaacttaaaccacttgaggaagccttgaatcttgctccgtccaaaaactttcatttgcggccacgagtcctgataagcaacatcaacgtgatcgtcctggaactgaaaggaagcgaaacgacgtttatgtgcgaatatgcagacgaaactgcgacaatcgttgaatttctcaatcgatggatcacttttagccaatctatcatcagcacgttgactggtggtggaggatcgggaggtggaggatctggaggaggaggatcgggtggaggaggatccgaaagtaagtatggccctccttgccctccgtgccctgcacctgagttcctcggcggtccttcagtgtttttgtttccacccaaacctaaagacacccttatgatctctcgaacacctgaagtaacctgtgtagttgttgatgtctcacaggaagatccggaggttcaatttaattggtacgtcgatggtgttgaagtgcataatgcgaagactaagccgagagaggaacagttcaattccacttatcgcgtggtttcagtccttcaggtcttgcacgtggattggcttaacggaaaggaatataagtgcaaggtaagtaataaagggcttccatcaagcattgaaaaaaccataagtaaagcaaaaggacaaccgagggagccccaagtctacacgcttcctccttctcaggaggagatgaccaaaaaccaggtaagtttgacgtgtttggtaaaggggttttatccctcagatattgttgtcgaatgggagtctaatggtcagcctgagaacaattacaagactacgccacccgttctggattcagacggatctttcttcctctacagcagattgacggtagacaaaagccgctggcaagagggcaatgtcttcagttgttctgtaatgcacgaagccctccataatcactacacgcagaaatctctgagcttgtctcttgggaaa

SEQ ID NO: 677 - DNA, 1146 bp, Artificial Sequence
  source: /note="Description of Artificial Sequence: Synthetic polynucleotide"
gcccctacgtcctcctcaactaaaaagacgcaacttcagcttgagcatcttcttctcgaccttcagatgattttgaacggaatcaataattacaaaaatcctaaacttactgaaatgctcacgtttaagttttatatgccaaaaaaggccactgagttgaaacaccttcaatgcttggaggaggaacttaaaccacttgaggaagccttgaatcttgctccgtccaaaaactttcatttgcggccacgagatctgataaggaacatcaacgtgatcgtcctggaactgaaaggaagcgaaacgacgtttatgtgcgaatatgcagacgaaactgcgacaatcgttgaatttctcaatcgatggatcacttttagccaatctatcatcagcacgttgactggtggtggaggatcgggaggtggaggatctggaggaggaggatcgggtggaggaggatccgaaagtaagtatggccctccttgccctccgtgccctgcacctgagttcctcggcggtccttcagtgtttttgtttccacccaaacctaaagacacccttatgatctctcgaacacctgaagtaacctgtgtagttgttgatgtctcacaggaagatccggaggttcaatttaattggtacgtcgatggtgttgaagtgcataatgcgaagactaagccgagagaggaacagttcaattccacttatcgcgtggtttcagtccttcaggtcttgcacgtggattggcttaacggaaaggaatataagtgcaaggtaagtaataaagggcttccatcaagcattgaaaaaaccataagtaaagcaaaaggacaaccgagggagccccaagtctacacgcttcctccttctcaggaggagatgaccaaaaaccaggtaagtttgacgtgtttggtaaaggggttttatccctcagatattgttgtcgaatgggagtctaatggtcagcctgagaacaattacaagactacgccacccgttctggattcagacggatctttcttcctctacagcagattgacggtagacaaaagccgctggcaagagggcaatgtcttcagttgttctgtaatgcacgaagccctccataatcactacacgcagaaatctctgagcttgtctcttgggaaa

SEQ ID NO: 678 - DNA, 1146 bp, Artificial Sequence
  source: /note="Description of Artificial Sequence: Synthetic polynucleotide"
gcccctacgtcctcctcaactaaaaagacgcaacttcagcttgagcatcttcttctcgaccttcagatgattttgaacggaatcaataattacaaaaatcctaaacttactgaaatgctcacgtttaagttttatatgccaaaaaaggccactgagttgaaacaccttcaatgcttggaggaggaacttaaaccacttgaggaagccttgaatcttgctccgtccaaaaactttcatttgcggccacgagatctgataagcaacatcaacgtgagcgtcctggaactgaaaggaagcgaaacgacgtttatgtgcgaatatgcagacgaaactgcgacaatcgttgaatttctcaatcgatggatcacttttagccaatctatcatcagcacgttgactggtggtggaggatcgggaggtggaggatctggaggaggaggatcgggtggaggaggatccgaaagtaagtatggccctccttgccctccgtgccctgcacctgagttcctcggcggtccttcagtgtttttgtttccacccaaacctaaagacacccttatgatctctcgaacacctgaagtaacctgtgtagttgttgatgtctcacaggaagatccggaggttcaatttaattggtacgtcgatggtgttgaagtgcataatgcgaagactaagccgagagaggaacagttcaattccacttatcgcgtggtttcagtccttcaggtcttgcacgtggattggcttaacggaaaggaatataagtgcaaggtaagtaataaagggcttccatcaagcattgaaaaaaccataagtaaagcaaaaggacaaccgagggagccccaagtctacacgcttcctccttctcaggaggagatgaccaaaaaccaggtaagtttgacgtgtttggtaaaggggttttatccctcagatattgttgtcgaatgggagtctaatggtcagcctgagaacaattacaagactacgccacccgttctggattcagacggatctttcttcctctacagcagattgacggtagacaaaagccgctggcaagagggcaatgtcttcagttgttctgtaatgcacgaagccctccataatcactacacgcagaaatctctgagcttgtctcttgggaaa

SEQ ID NO: 679 - DNA, 1146 bp, Artificial Sequence
  source: /note="Description of Artificial Sequence: Synthetic polynucleotide"
gcccctacgtcctcctcaactaaaaagacgcaacttcagcttgagaaccttcttctcgaccttcagatgattttgaacggaatcaataattacaaaaatcctaaacttactagaatgctcacgcagaagttttatatgccaaaaaaggccactgagttgaaacaccttcaatgcttggaggaggaacttaaaccacttgaggaagccttgaatcttgctccgtccaaaaactttcatttgcggccacgagatctgataagcaacatcaacgtgatcgtcctggaactgaaaggaagcgaaacgacgtttatgtgcgaatatgcagacgaaactgcgacaatcgttgaatttctcaatcgatggatcacttttagccaatctatcatcagcacgttgactggtggtggaggatcgggaggtggaggatctggaggaggaggatcgggtggaggaggatccgaaagtaagtatggccctccttgccctccgtgccctgcacctgagttcctcggcggtccttcagtgtttttgtttccacccaaacctaaagacacccttatgatctctcgaacacctgaagtaacctgtgtagttgttgatgtctcacaggaagatccggaggttcaatttaattggtacgtcgatggtgttgaagtgcataatgcgaagactaagccgagagaggaacagttcaattccacttatcgcgtggtttcagtccttcaggtcttgcacgtggattggcttaacggaaaggaatataagtgcaaggtaagtaataaagggcttccatcaagcattgaaaaaaccataagtaaagcaaaaggacaaccgagggagccccaagtctacacgcttcctccttctcaggaggagatgaccaaaaaccaggtaagtttgacgtgtttggtaaaggggttttatccctcagatattgttgtcgaatgggagtctaatggtcagcctgagaacaattacaagactacgccacccgttctggattcagacggatctttcttcctctacagcagattgacggtagacaaaagccgctggcaagagggcaatgtcttcagttgttctgtaatgcacgaagccctccataatcactacacgcagaaatctctgagcttgtctcttgggaaa

SEQ ID NO: 680 - DNA, 1146 bp, Artificial Sequence
  source: /note="Description of Artificial Sequence: Synthetic polynucleotide"
gcccctacgtcctcctcaactaaaaagacgcaacttcagcttgagcatcttcttctcgaccttcagatgattttgaacggaatcaataattacaaaaatcctaaacttactagaatgctcacgcagaagttttatatgccaaaaaaggccactgagttgaaacaccttcaatgcttggaggaggaacttaaaccacttgaggaagccttgaatcttgctccgtccaaaaactttcatttgcggccacgagatctgataagcaacatcaacgtgagcgtcctggaactgaaaggaagcgaaacgacgtttatgtgcgaatatgcagacgaaactgcgacaatcgttgaatttctcaatcgatggatcacttttagccaatctatcatcagcacgttgactggtggtggaggatcgggaggtggaggatctggaggaggaggatcgggtggaggaggatccgaaagtaagtatggccctccttgccctccgtgccctgcacctgagttcctcggcggtccttcagtgtttttgtttccacccaaacctaaagacacccttatgatctctcgaacacctgaagtaacctgtgtagttgttgatgtctcacaggaagatccggaggttcaatttaattggtacgtcgatggtgttgaagtgcataatgcgaagactaagccgagagaggaacagttcaattccacttatcgcgtggtttcagtccttcaggtcttgcacgtggattggcttaacggaaaggaatataagtgcaaggtaagtaataaagggcttccatcaagcattgaaaaaaccataagtaaagcaaaaggacaaccgagggagccccaagtctacacgcttcctccttctcaggaggagatgaccaaaaaccaggtaagtttgacgtgtttggtaaaggggttttatccctcagatattgttgtcgaatgggagtctaatggtcagcctgagaacaattacaagactacgccacccgttctggattcagacggatctttcttcctctacagcagattgacggtagacaaaagccgctggcaagagggcaatgtcttcagttgttctgtaatgcacgaagccctccataatcactacacgcagaaatctctgagcttgtctcttgggaaa

SEQ ID NO: 681 - DNA, 1146 bp, Artificial Sequence
  source: /note="Description of Artificial Sequence: Synthetic polynucleotide"
gcccctacgtcctcctcaactaaaaagacgcaacttcagcttgagaaccttcttctcgaccttcagatgattttgaacggaatcaataattacaaaaatcctgaacttactaacatgctcacgtttaagttttatatgccaaaaaaggccactgagttgaaacaccttcaatgcttggaggaggaacttaaaccacttgaggaagccttgaatcttgctccgtccaaaaactttcatttgcggccacgagatctgataagcaacatcaacgtgatcgtcctggaactgaaaggaagcgaaacgacgtttatgtgcgaatatgcagacgaaactgcgacaatcgttgaatttctcaatcgatggatcacttttagccaatctatcatcagcacgttgactggtggtggaggatcgggaggtggaggatctggaggaggaggatcgggtggaggaggatccgaaagtaagtatggccctccttgccctccgtgccctgcacctgagttcctcggcggtccttcagtgtttttgtttccacccaaacctaaagacacccttatgatctctcgaacacctgaagtaacctgtgtagttgttgatgtctcacaggaagatccggaggttcaatttaattggtacgtcgatggtgttgaagtgcataatgcgaagactaagccgagagaggaacagttcaattccacttatcgcgtggtttcagtccttcaggtcttgcacgtggattggcttaacggaaaggaatataagtgcaaggtaagtaataaagggcttccatcaagcattgaaaaaaccataagtaaagcaaaaggacaaccgagggagccccaagtctacacgcttcctccttctcaggaggagatgaccaaaaaccaggtaagtttgacgtgtttggtaaaggggttttatccctcagatattgttgtcgaatgggagtctaatggtcagcctgagaacaattacaagactacgccacccgttctggattcagacggatctttcttcctctacagcagattgacggtagacaaaagccgctggcaagagggcaatgtcttcagttgttctgtaatgcacgaagccctccataatcactacacgcagaaatctctgagcttgtctcttgggaaa

SEQ ID NO: 682 - DNA, 1146 bp, Artificial Sequence
  source: /note="Description of Artificial Sequence: Synthetic polynucleotide"
gcccctacgtcctcctcaactaaaaagacgcaacttcagcttgagcatcttcttctcgaccttcagatgattttgaacggaatcaataattacaaaaatcctaaacttactagaatgctcacgtttaagttttatatgccaaaaaaggccactgagttgaaacaccttcaatgcttggaggaggaacttaaaccacttgaggaagtattgaatcttgctcagtccaaaaactttcatttgcggccacgagatctgataagcaacatcaacgtgatcgtcctggaactgaaaggaagcgaaacgacgtttatgtgcgaatatgcagacgaaactgcgacaatcgttgaatttctcaatcgatggatcacttttagccaatctatcatcagcacgttgactggtggtggaggatcgggaggtggaggatctggaggaggaggatcgggtggaggaggatccgaaagtaagtatggccctccttgccctccgtgccctgcacctgagttcctcggcggtccttcagtgtttttgtttccacccaaacctaaagacacccttatgatctctcgaacacctgaagtaacctgtgtagttgttgatgtctcacaggaagatccggaggttcaatttaattggtacgtcgatggtgttgaagtgcataatgcgaagactaagccgagagaggaacagttcaattccacttatcgcgtggtttcagtccttcaggtcttgcacgtggattggcttaacggaaaggaatataagtgcaaggtaagtaataaagggcttccatcaagcattgaaaaaaccataagtaaagcaaaaggacaaccgagggagccccaagtctacacgcttcctccttctcaggaggagatgaccaaaaaccaggtaagtttgacgtgtttggtaaaggggttttatccctcagatattgttgtcgaatgggagtctaatggtcagcctgagaacaattacaagactacgccacccgttctggattcagacggatctttcttcctctacagcaaattgacggtagacaaaagccgctggcaagagggcaatgtcttcagttgttctgtaatgcacgaagccctccataatcactacacgcagaaatctctgagcttgtctcttgggaaa

SEQ ID NO: 683 - DNA, 1146 bp, Artificial Sequence
  source: /note="Description of Artificial Sequence: Synthetic polynucleotide"
gcccctacgtcctcctcaactaaaaagacgcaacttcagcttgagcatcttcttctcgaccttcagatgattttgaacggaatcaataattacaaaaatcctaaacttactagaatgctcacgtttaagttttatatgccaaaaaaggccactgagttgaaacaccttcaatgcttggaggaggaacttaaaccacttgaggaagccttgaatcttgctccgtccaaaaactttcatttgcggccacgagatctgataagcaacatcaacgtgatcgtcctggaactgaaaggaagcgaaacgacgtttatgtgcgaatatgcagacgaaactgcgacaatcgttgaatttctcaatcgatggatcacttttagccaatctatcatcagcacgttgactggtggtggaggatcgggaggtggaggatctggaggaggaggatcgggtggaggaggatccgaaagtaagtatggccctccttgccctccgtgccctgcacctgagttcctcggcggtccttcagtgtttttgtttccacccaaacctaaagacacccttatgatctctcgaacacctgaagtaacctgtgtagttgttgatgtctcacaggaagatccggaggttcaatttaattggtacgtcgatggtgttgaagtgcataatgcgaagactaagccgagagaggaacagttcaattccacttatcgcgtggtttcagtccttcaggtcttgcacgtggattggcttaacggaaaggaatataagtgcaaggtaagtaataaagggcttccatcaagcattgaaaaaaccataagtaaagcaaaaggacaaccgagggagccccaagtctacacgcttcctccttctcaggaggagatgaccaaaaaccaggtaagtttgacgtgtttggtaaaggggttttatccctcagatattgttgtcgaatgggagtctaatggtcagcctgagaacaattacaagactacgccacccgttctggattcagacggatctttcttcctctacagcaaattgacggtagacaaaagccgctggcaagagggcaatgtcttcagttgttctgtaatgcacgaagccctccataatcactacacgcagaaatctctgagcttgtctcttgggaaa

SEQ ID NO: 684 - DNA, 1146 bp, Artificial Sequence
  source: /note="Description of Artificial Sequence: Synthetic polynucleotide"
gcccctacgtcctcctcaactaaaaagacgcaacttcagcttgaggatcttcttctcgaccttcagatgattttgaacggaatcaataattacaaaaatcctaaacttactagaatgctcacgtttaagttttatatgccaaaaaaggccactgagttgaaacaccttcaatgcttggaggaggaacttaaaccacttgaggaagccttgaatcttgctccgtccaaaaactttcatttgcggccacgagatctgataagcaacatcaacgtgatcgtcctggaactgaaaggaagcgaaacgacgtttatgtgcgaatatgcagacgaaactgcgacaatcgttgaatttctcaatcgatggatcacttttagccaatctatcatcagcacgttgactggtggtggaggatcgggaggtggaggatctggaggaggaggatcgggtggaggaggatccgaaagtaagtatggccctccttgccctccgtgccctgcacctgagttcctcggcggtccttcagtgtttttgtttccacccaaacctaaagacacccttatgatctctcgaacacctgaagtaacctgtgtagttgttgatgtctcacaggaagatccggaggttcaatttaattggtacgtcgatggtgttgaagtgcataatgcgaagactaagccgagagaggaacagttcaattccacttatcgcgtggtttcagtccttcaggtcttgcacgtggattggcttaacggaaaggaatataagtgcaaggtaagtaataaagggcttccatcaagcattgaaaaaaccataagtaaagcaaaaggacaaccgagggagccccaagtctacacgcttcctccttctcaggaggagatgaccaaaaaccaggtaagtttgacgtgtttggtaaaggggttttatccctcagatattgttgtcgaatgggagtctaatggtcagcctgagaacaattacaagactacgccacccgttctggattcagacggatctttcttcctctacagcaaattgacggtagacaaaagccgctggcaagagggcaatgtcttcagttgttctgtaatgcacgaagccctccataatcactacacgcagaaatctctgagcttgtctcttgggaaa

SEQ ID NO: 685 - DNA, 1146 bp, Artificial Sequence
  source: /note="Description of Artificial Sequence: Synthetic polynucleotide"
gcccctacgtcctcctcaactaaaaagacgcaacttcagcttgagaatcttcttctcgaccttcagatgattttgaacggaatcaataattacaaaaatcctaaacttactagaatgctcacgtttaagttttatatgccaaaaaaggccactgagttgaaacaccttcaatgcttggaggaggaacttaaaccacttgaggaagccttgaatcttgctccgtccaaaaactttcatttgcggccacgagatctgataagcaacatcaacgtgatcgtcctggaactgaaaggaagcgaaacgacgtttatgtgcgaatatgcagacgaaactgcgacaatcgttgaatttctcaatcgatggatcacttttagccaatctatcatcagcacgttgactggtggtggaggatcgggaggtggaggatctggaggaggaggatcgggtggaggaggatccgaaagtaagtatggccctccttgccctccgtgccctgcacctgagttcctcggcggtccttcagtgtttttgtttccacccaaacctaaagacacccttatgatctctcgaacacctgaagtaacctgtgtagttgttgatgtctcacaggaagatccggaggttcaatttaattggtacgtcgatggtgttgaagtgcataatgcgaagactaagccgagagaggaacagttcaattccacttatcgcgtggtttcagtccttcaggtcttgcacgtggattggcttaacggaaaggaatataagtgcaaggtaagtaataaagggcttccatcaagcattgaaaaaaccataagtaaagcaaaaggacaaccgagggagccccaagtctacacgcttcctccttctcaggaggagatgaccaaaaaccaggtaagtttgacgtgtttggtaaaggggttttatccctcagatattgttgtcgaatgggagtctaatggtcagcctgagaacaattacaagactacgccacccgttctggattcagacggatctttcttcctctacagcaaattgacggtagacaaaagccgctggcaagagggcaatgtcttcagttgttctgtaatgcacgaagccctccataatcactacacgcagaaatctctgagcttgtctcttgggaaa

SEQ ID NO: 686 - DNA, 1146 bp, Artificial Sequence
  source: /note="Description of Artificial Sequence: Synthetic polynucleotide"
gcccctacgtcctcctcaactaaaaagacgcaacttcagcttgagctgcttcttctcgaccttcagatgattttgaacggaatcaataattacaaaaatcctaaacttactagaatgctcacgtttaagttttatatgccaaaaaaggccactgagttgaaacaccttcaatgcttggaggaggaacttaaaccacttgaggaagccttgaatcttgctccgtccaaaaactttcatttgcggccacgagatctgataagcaacatcaacgtgatcgtcctggaactgaaaggaagcgaaacgacgtttatgtgcgaatatgcagacgaaactgcgacaatcgttgaatttctcaatcgatggatcacttttagccaatctatcatcagcacgttgactggtggtggaggatcgggaggtggaggatctggaggaggaggatcgggtggaggaggatccgaaagtaagtatggccctccttgccctccgtgccctgcacctgagttcctcggcggtccttcagtgtttttgtttccacccaaacctaaagacacccttatgatctctcgaacacctgaagtaacctgtgtagttgttgatgtctcacaggaagatccggaggttcaatttaattggtacgtcgatggtgttgaagtgcataatgcgaagactaagccgagagaggaacagttcaattccacttatcgcgtggtttcagtccttcaggtcttgcacgtggattggcttaacggaaaggaatataagtgcaaggtaagtaataaagggcttccatcaagcattgaaaaaaccataagtaaagcaaaaggacaaccgagggagccccaagtctacacgcttcctccttctcaggaggagatgaccaaaaaccaggtaagtttgacgtgtttggtaaaggggttttatccctcagatattgttgtcgaatgggagtctaatggtcagcctgagaacaattacaagactacgccacccgttctggattcagacggatctttcttcctctacagcaaattgacggtagacaaaagccgctggcaagagggcaatgtcttcagttgttctgtaatgcacgaagccctccataatcactacacgcagaaatctctgagcttgtctcttgggaaa

SEQ ID NO: 687 - DNA, 1146 bp, Artificial Sequence
  source: /note="Description of Artificial Sequence: Synthetic polynucleotide"
gcccctacgtcctcctcaactaaaaagacgcaacttcagcttgagcatcttcttctcgaccttcagatgattttgaacggaaccaataattacaaaaatcctaaacttactagaatgctcacgtttaagttttatatgccaaaaaaggccactgagttgaaacaccttcaatgcttggaggaggaacttaaaccacttgaggaagccttgaatcttgctccgtccaaaaactttcatttgcggccacgagatctgataagcaacatcaacgtgatcgtcctggaactgaaaggaagcgaaacgacgtttatgtgcgaatatgcagacgaaactgcgacaatcgttgaatttctcaatcgatggatcacttttagccaatctatcatcagcacgttgactggtggtggaggatcgggaggtggaggatctggaggaggaggatcgggtggaggaggatccgaaagtaagtatggccctccttgccctccgtgccctgcacctgagttcctcggcggtccttcagtgtttttgtttccacccaaacctaaagacacccttatgatctctcgaacacctgaagtaacctgtgtagttgttgatgtctcacaggaagatccggaggttcaatttaattggtacgtcgatggtgttgaagtgcataatgcgaagactaagccgagagaggaacagttcaattccacttatcgcgtggtttcagtccttcaggtcttgcacgtggattggcttaacggaaaggaatataagtgcaaggtaagtaataaagggcttccatcaagcattgaaaaaaccataagtaaagcaaaaggacaaccgagggagccccaagtctacacgcttcctccttctcaggaggagatgaccaaaaaccaggtaagtttgacgtgtttggtaaaggggttttatccctcagatattgttgtcgaatgggagtctaatggtcagcctgagaacaattacaagactacgccacccgttctggattcagacggatctttcttcctctacagcaaattgacggtagacaaaagccgctggcaagagggcaatgtcttcagttgttctgtaatgcacgaagccctccataatcactacacgcagaaatctctgagcttgtctcttgggaaa

SEQ ID NO: 688 - DNA, 1146 bp, Artificial Sequence
  source: /note="Description of Artificial Sequence: Synthetic polynucleotide"
gcccctacgtcctcctcaactaaaaagacgcaacttcagcttgagcatcttcttctcgaccttcagatgattttgaacggaatcaataattacaaaaatcctaaacttactagaatgctcacgtttaagttttatatgccaaaaaaggccactgagttgaaacaccttcaatgcttggaggaggaacttaaaccacttgaggaagccttgaatcttgctccgtccaaaaactttcatttgcggccacgagttctgataagcaacatcaacgtgatcgtcctggaactgaaaggaagcgaaacgacgtttatgtgcgaatatgcagacgaaactgcgacaatcgttgaatttctcaatcgatggatcacttttagccaatctatcatcagcacgttgactggtggtggaggatcgggaggtggaggatctggaggaggaggatcgggtggaggaggatccgaaagtaagtatggccctccttgccctccgtgccctgcacctgagttcctcggcggtccttcagtgtttttgtttccacccaaacctaaagacacccttatgatctctcgaacacctgaagtaacctgtgtagttgttgatgtctcacaggaagatccggaggttcaatttaattggtacgtcgatggtgttgaagtgcataatgcgaagactaagccgagagaggaacagttcaattccacttatcgcgtggtttcagtccttcaggtcttgcacgtggattggcttaacggaaaggaatataagtgcaaggtaagtaataaagggcttccatcaagcattgaaaaaaccataagtaaagcaaaaggacaaccgagggagccccaagtctacacgcttcctccttctcaggaggagatgaccaaaaaccaggtaagtttgacgtgtttggtaaaggggttttatccctcagatattgttgtcgaatgggagtctaatggtcagcctgagaacaattacaagactacgccacccgttctggattcagacggatctttcttcctctacagcaaattgacggtagacaaaagccgctggcaagagggcaatgtcttcagttgttctgtaatgcacgaagccctccataatcactacacgcagaaatctctgagcttgtctcttgggaaa

SEQ ID NO: 689 - DNA, 1146 bp, Artificial Sequence
  source: /note="Description of Artificial Sequence: Synthetic polynucleotide"
gcccctacgtcctcctcaactaaaaagacgcaacttcagcttgagcatcttcttctcgaccttcagatgattttgaacggaatcaataattacaaaaatcctaaacttactagaatgctcacgtttaagttttatatgccaaaaaaggccactgagttgaaacaccttcaatgcttggaggaggaacttaaaccacttgaggaagccttgaatcttgctccgtccaaaaactttcatttgcggccacgagatctgatacgtaacatcaacgtgatcgtcctggaactgaaaggaagcgaaacgacgtttatgtgcgaatatgcagacgaaactgcgacaatcgttgaatttctcaatcgatggatcacttttagccaatctatcatcagcacgttgactggtggtggaggatcgggaggtggaggatctggaggaggaggatcgggtggaggaggatccgaaagtaagtatggccctccttgccctccgtgccctgcacctgagttcctcggcggtccttcagtgtttttgtttccacccaaacctaaagacacccttatgatctctcgaacacctgaagtaacctgtgtagttgttgatgtctcacaggaagatccggaggttcaatttaattggtacgtcgatggtgttgaagtgcataatgcgaagactaagccgagagaggaacagttcaattccacttatcgcgtggtttcagtccttcaggtcttgcacgtggattggcttaacggaaaggaatataagtgcaaggtaagtaataaagggcttccatcaagcattgaaaaaaccataagtaaagcaaaaggacaaccgagggagccccaagtctacacgcttcctccttctcaggaggagatgaccaaaaaccaggtaagtttgacgtgtttggtaaaggggttttatccctcagatattgttgtcgaatgggagtctaatggtcagcctgagaacaattacaagactacgccacccgttctggattcagacggatctttcttcctctacagcaaattgacggtagacaaaagccgctggcaagagggcaatgtcttcagttgttctgtaatgcacgaagccctccataatcactacacgcagaaatctctgagcttgtctcttgggaaa

SEQ ID NO: 690 - DNA, 1146 bp, Artificial Sequence
  source: /note="Description of Artificial Sequence: Synthetic polynucleotide"
gcccctacgtcctcctcaactaaaaagacgcaacttcagcttgagcatcttcttctcgaccttcagatgattttgaacggaatcaataattacaaaaatcctaaacttactagaatgctcacgtttaagttttatatgccaaaaaaggccactgagttgaaacaccttcaatgcttggaggaggaacttaaaccacttgaggaagccttgaatcttgctccgtccaaaaactttcatttgcggccacgagatctgataagcctgatcaacgtgatcgtcctggaactgaaaggaagcgaaacgacgtttatgtgcgaatatgcagacgaaactgcgacaatcgttgaatttctcaatcgatggatcacttttagccaatctatcatcagcacgttgactggtggtggaggatcgggaggtggaggatctggaggaggaggatcgggtggaggaggatccgaaagtaagtatggccctccttgccctccgtgccctgcacctgagttcctcggcggtccttcagtgtttttgtttccacccaaacctaaagacacccttatgatctctcgaacacctgaagtaacctgtgtagttgttgatgtctcacaggaagatccggaggttcaatttaattggtacgtcgatggtgttgaagtgcataatgcgaagactaagccgagagaggaacagttcaattccacttatcgcgtggtttcagtccttcaggtcttgcacgtggattggcttaacggaaaggaatataagtgcaaggtaagtaataaagggcttccatcaagcattgaaaaaaccataagtaaagcaaaaggacaaccgagggagccccaagtctacacgcttcctccttctcaggaggagatgaccaaaaaccaggtaagtttgacgtgtttggtaaaggggttttatccctcagatattgttgtcgaatgggagtctaatggtcagcctgagaacaattacaagactacgccacccgttctggattcagacggatctttcttcctctacagcaaattgacggtagacaaaagccgctggcaagagggcaatgtcttcagttgttctgtaatgcacgaagccctccataatcactacacgcagaaatctctgagcttgtctcttgggaaa

SEQ ID NO: 691 - DNA, 1146 bp, Artificial Sequence
  source: /note="Description of Artificial Sequence: Synthetic polynucleotide"
gcccctacgtcctcctcaactaaaaagacgcaacttcagcttgagcatcttcttctcgaccttcagatgattttgaacggaatcaataattacaaaaatcctaaacttactagaatgctcacgtttaagttttatatgccaaaaaaggccactgagttgaaacaccttcaatgcttggaggaggaacttaaaccacttgaggaagccttgaatcttgctccgtccaaaaactttcatttgcggccacgagatctgataagcagcatcaacgtgatcgtcctggaactgaaaggaagcgaaacgacgtttatgtgcgaatatgcagacgaaactgcgacaatcgttgaatttctcaatcgatggatcacttttagccaatctatcatcagcacgttgactggtggtggaggatcgggaggtggaggatctggaggaggaggatcgggtggaggaggatccgaaagtaagtatggccctccttgccctccgtgccctgcacctgagttcctcggcggtccttcagtgtttttgtttccacccaaacctaaagacacccttatgatctctcgaacacctgaagtaacctgtgtagttgttgatgtctcacaggaagatccggaggttcaatttaattggtacgtcgatggtgttgaagtgcataatgcgaagactaagccgagagaggaacagttcaattccacttatcgcgtggtttcagtccttcaggtcttgcacgtggattggcttaacggaaaggaatataagtgcaaggtaagtaataaagggcttccatcaagcattgaaaaaaccataagtaaagcaaaaggacaaccgagggagccccaagtctacacgcttcctccttctcaggaggagatgaccaaaaaccaggtaagtttgacgtgtttggtaaaggggttttatccctcagatattgttgtcgaatgggagtctaatggtcagcctgagaacaattacaagactacgccacccgttctggattcagacggatctttcttcctctacagcaaattgacggtagacaaaagccgctggcaagagggcaatgtcttcagttgttctgtaatgcacgaagccctccataatcactacacgcagaaatctctgagcttgtctcttgggaaa

SEQ ID NO: 692 - DNA, 1146 bp, Artificial Sequence
  source: /note="Description of Artificial Sequence: Synthetic polynucleotide"
gcccctacgtcctcctcaactaaaaagacgcaacttcagcttgagcatcttcttctcgaccttcagatgattttgaacggaatcaataattacaaaaatcctaaacttactagaatgctcacgtttaagttttatatgccaaaaaaggccactgagttgaaacaccttcaatgcttggaggaggaacttaaaccacttgaggaagccttgaatcttgctccgtccaaaaactttcatttgcggccacgagatctgataagcaacatcaacgtgagcgtcctggaactgaaaggaagcgaaacgacgtttatgtgcgaatatgcagacgaaactgcgacaatcgttgaatttctcaatcgatggatcacttttagccaatctatcatcagcacgttgactggtggtggaggatcgggaggtggaggatctggaggaggaggatcgggtggaggaggatccgaaagtaagtatggccctccttgccctccgtgccctgcacctgagttcctcggcggtccttcagtgtttttgtttccacccaaacctaaagacacccttatgatctctcgaacacctgaagtaacctgtgtagttgttgatgtctcacaggaagatccggaggttcaatttaattggtacgtcgatggtgttgaagtgcataatgcgaagactaagccgagagaggaacagttcaattccacttatcgcgtggtttcagtccttcaggtcttgcacgtggattggcttaacggaaaggaatataagtgcaaggtaagtaataaagggcttccatcaagcattgaaaaaaccataagtaaagcaaaaggacaaccgagggagccccaagtctacacgcttcctccttctcaggaggagatgaccaaaaaccaggtaagtttgacgtgtttggtaaaggggttttatccctcagatattgttgtcgaatgggagtctaatggtcagcctgagaacaattacaagactacgccacccgttctggattcagacggatctttcttcctctacagcaaattgacggtagacaaaagccgctggcaagagggcaatgtcttcagttgttctgtaatgcacgaagccctccataatcactacacgcagaaatctctgagcttgtctcttgggaaa

SEQ ID NO: 693 - DNA, 1146 bp, Artificial Sequence
  source: /note="Description of Artificial Sequence: Synthetic polynucleotide"
gcccctacgtcctcctcaactaaaaagacgcaacttcagcttgagcatcttcttctcgaccttcagatgattttgaacggaatcaataattacaaaaatcctgaacttactagaatgctcacgtttaagttttatatgccaaaaaaggccactgagttgaaacaccttcaatgcttggaggaggaacttaaaccacttgaggaagccttgaatcttgctccgtccaaaaactttcatttgcggccacgagatctgataagcaacatcaacgtgatcgtcctggaactgaaaggaagcgaaacgacgtttatgtgcgaatatgcagacgaaactgcgacaatcgttgaatttctcaatcgatggatcacttttagccaatctatcatcagcacgttgactggtggtggaggatcgggaggtggaggatctggaggaggaggatcgggtggaggaggatccgaaagtaagtatggccctccttgccctccgtgccctgcacctgagttcctcggcggtccttcagtgtttttgtttccacccaaacctaaagacacccttatgatctctcgaacacctgaagtaacctgtgtagttgttgatgtctcacaggaagatccggaggttcaatttaattggtacgtcgatggtgttgaagtgcataatgcgaagactaagccgagagaggaacagttcaattccacttatcgcgtggtttcagtccttcaggtcttgcacgtggattggcttaacggaaaggaatataagtgcaaggtaagtaataaagggcttccatcaagcattgaaaaaaccataagtaaagcaaaaggacaaccgagggagccccaagtctacacgcttcctccttctcaggaggagatgaccaaaaaccaggtaagtttgacgtgtttggtaaaggggttttatccctcagatattgttgtcgaatgggagtctaatggtcagcctgagaacaattacaagactacgccacccgttctggattcagacggatctttcttcctctacagcaaattgacggtagacaaaagccgctggcaagagggcaatgtcttcagttgttctgtaatgcacgaagccctccataatcactacacgcagaaatctctgagcttgtctcttgggaaa

SEQ ID NO: 694 - DNA, 1146 bp, Artificial Sequence
  source: /note="Description of Artificial Sequence: Synthetic polynucleotide"
gcccctacgtcctcctcaactaaaaagacgcaacttcagcttgagaaccttcttctcgaccttcagatgattttgaacggaatcaataattacaaaaatcctgaacttactagaatgctcacgtttaagttttatatgccaaaaaaggccactgagttgaaacaccttcaatgcttggaggaggaacttaaaccacttgaggaagccttgaatcttgctccgtccaaaaactttcatttgcggccacgagatctgataagcaacatcaacgtgatcgtcctggaactgaaaggaagcgaaacgacgtttatgtgcgaatatgcagacgaaactgcgacaatcgttgaatttctcaatcgatggatcacttttagccaatctatcatcagcacgttgactggtggtggaggatcgggaggtggaggatctggaggaggaggatcgggtggaggaggatccgaaagtaagtatggccctccttgccctccgtgccctgcacctgagttcctcggcggtccttcagtgtttttgtttccacccaaacctaaagacacccttatgatctctcgaacacctgaagtaacctgtgtagttgttgatgtctcacaggaagatccggaggttcaatttaattggtacgtcgatggtgttgaagtgcataatgcgaagactaagccgagagaggaacagttcaattccacttatcgcgtggtttcagtccttcaggtcttgcacgtggattggcttaacggaaaggaatataagtgcaaggtaagtaataaagggcttccatcaagcattgaaaaaaccataagtaaagcaaaaggacaaccgagggagccccaagtctacacgcttcctccttctcaggaggagatgaccaaaaaccaggtaagtttgacgtgtttggtaaaggggttttatccctcagatattgttgtcgaatgggagtctaatggtcagcctgagaacaattacaagactacgccacccgttctggattcagacggatctttcttcctctacagcaaattgacggtagacaaaagccgctggcaagagggcaatgtcttcagttgttctgtaatgcacgaagccctccataatcactacacgcagaaatctctgagcttgtctcttgggaaa

SEQ ID NO: 695 - DNA, 1146 bp, Artificial Sequence
  source: /note="Description of Artificial Sequence: Synthetic polynucleotide"
gcccctacgtcctcctcaactaaaaagacgcaacttcagcttgagctgcttcttctcgaccttcagatgattttgaacggaatcaataattacaaaaatcctgaacttactagaatgctcacgtttaagttttatatgccaaaaaaggccactgagttgaaacaccttcaatgcttggaggaggaacttaaaccacttgaggaagccttgaatcttgctccgtccaaaaactttcatttgcggccacgagatctgataagcaacatcaacgtgatcgtcctggaactgaaaggaagcgaaacgacgtttatgtgcgaatatgcagacgaaactgcgacaatcgttgaatttctcaatcgatggatcacttttagccaatctatcatcagcacgttgactggtggtggaggatcgggaggtggaggatctggaggaggaggatcgggtggaggaggatccgaaagtaagtatggccctccttgccctccgtgccctgcacctgagttcctcggcggtccttcagtgtttttgtttccacccaaacctaaagacacccttatgatctctcgaacacctgaagtaacctgtgtagttgttgatgtctcacaggaagatccggaggttcaatttaattggtacgtcgatggtgttgaagtgcataatgcgaagactaagccgagagaggaacagttcaattccacttatcgcgtggtttcagtccttcaggtcttgcacgtggattggcttaacggaaaggaatataagtgcaaggtaagtaataaagggcttccatcaagcattgaaaaaaccataagtaaagcaaaaggacaaccgagggagccccaagtctacacgcttcctccttctcaggaggagatgaccaaaaaccaggtaagtttgacgtgtttggtaaaggggttttatccctcagatattgttgtcgaatgggagtctaatggtcagcctgagaacaattacaagactacgccacccgttctggattcagacggatctttcttcctctacagcaaattgacggtagacaaaagccgctggcaagagggcaatgtcttcagttgttctgtaatgcacgaagccctccataatcactacacgcagaaatctctgagcttgtctcttgggaaa

SEQ ID NO: 696 - DNA, 1146 bp, Artificial Sequence
  source: /note="Description of Artificial Sequence: Synthetic polynucleotide"
gcccctacgtcctcctcaactaaaaagacgcaacttcagcttgagcatcttcttctcgaccttcagatgattttgaacggaatcaataattacaaaaatcctgaacttactagaatgctcacgtttaagttttatatgccaaaaaaggccactgagttgaaacaccttcaatgcttggaggaggaacttaaaccacttgaggaagccttgaatcttgctccgtccaaaaactttcatttgcggccacgagtgctgataagcaacatcaacgtgatcgtcctggaactgaaaggaagcgaaacgacgtttatgtgcgaatatgcagacgaaactgcgacaatcgttgaatttctcaatcgatggatcacttttagccaatctatcatcagcacgttgactggtggtggaggatcgggaggtggaggatctggaggaggaggatcgggtggaggaggatccgaaagtaagtatggccctccttgccctccgtgccctgcacctgagttcctcggcggtccttcagtgtttttgtttccacccaaacctaaagacacccttatgatctctcgaacacctgaagtaacctgtgtagttgttgatgtctcacaggaagatccggaggttcaatttaattggtacgtcgatggtgttgaagtgcataatgcgaagactaagccgagagaggaacagttcaattccacttatcgcgtggtttcagtccttcaggtcttgcacgtggattggcttaacggaaaggaatataagtgcaaggtaagtaataaagggcttccatcaagcattgaaaaaaccataagtaaagcaaaaggacaaccgagggagccccaagtctacacgcttcctccttctcaggaggagatgaccaaaaaccaggtaagtttgacgtgtttggtaaaggggttttatccctcagatattgttgtcgaatgggagtctaatggtcagcctgagaacaattacaagactacgccacccgttctggattcagacggatctttcttcctctacagcaaattgacggtagacaaaagccgctggcaagagggcaatgtcttcagttgttctgtaatgcacgaagccctccataatcactacacgcagaaatctctgagcttgtctcttgggaaa

SEQ ID NO: 697 - DNA, 1146 bp, Artificial Sequence
  source: /note="Description of Artificial Sequence: Synthetic polynucleotide"
gcccctacgtcctcctcaactaaaaagacgcaacttcagcttgagcatcttcttctcgaccttcagatgattttgaacggaatcaataattacaaaaatcctgaacttactagaatgctcacgtttaagttttatatgccaaaaaaggccactgagttgaaacaccttcaatgcttggaggaggaacttaaaccacttgaggaagccttgaatcttgctccgtccaaaaactttcatttgcggccacgagatctgataagcaacatcaacgtgagcgtcctggaactgaaaggaagcgaaacgacgtttatgtgcgaatatgcagacgaaactgcgacaatcgttgaatttctcaatcgatggatcacttttagccaatctatcatcagcacgttgactggtggtggaggatcgggaggtggaggatctggaggaggaggatcgggtggaggaggatccgaaagtaagtatggccctccttgccctccgtgccctgcacctgagttcctcggcggtccttcagtgtttttgtttccacccaaacctaaagacacccttatgatctctcgaacacctgaagtaacctgtgtagttgttgatgtctcacaggaagatccggaggttcaatttaattggtacgtcgatggtgttgaagtgcataatgcgaagactaagccgagagaggaacagttcaattccacttatcgcgtggtttcagtccttcaggtcttgcacgtggattggcttaacggaaaggaatataagtgcaaggtaagtaataaagggcttccatcaagcattgaaaaaaccataagtaaagcaaaaggacaaccgagggagccccaagtctacacgcttcctccttctcaggaggagatgaccaaaaaccaggtaagtttgacgtgtttggtaaaggggttttatccctcagatattgttgtcgaatgggagtctaatggtcagcctgagaacaattacaagactacgccacccgttctggattcagacggatctttcttcctctacagcaaattgacggtagacaaaagccgctggcaagagggcaatgtcttcagttgttctgtaatgcacgaagccctccataatcactacacgcagaaatctctgagcttgtctcttgggaaa

SEQ ID NO: 698 - DNA, 1146 bp, Artificial Sequence
  source: /note="Description of Artificial Sequence: Synthetic polynucleotide"
gcccctacgtcctcctcaactaaaaagacgcaacttcagcttgagcatcttcttctcgaccttcagatgattttgaacggaatcaataattacaaaaatcctaaacttactcagatgctcacgtttaagttttatatgccaaaaaaggccactgagttgaaacaccttcaatgcttggaggaggaacttaaaccacttgaggaagccttgaatcttgctccgtccaaaaactttcatttgcggccacgagatctgataagcaacatcaacgtgatcgtcctggaactgaaaggaagcgaaacgacgtttatgtgcgaatatgcagacgaaactgcgacaatcgttgaatttctcaatcgatggatcacttttagccaatctatcatcagcacgttgactggtggtggaggatcgggaggtggaggatctggaggaggaggatcgggtggaggaggatccgaaagtaagtatggccctccttgccctccgtgccctgcacctgagttcctcggcggtccttcagtgtttttgtttccacccaaacctaaagacacccttatgatctctcgaacacctgaagtaacctgtgtagttgttgatgtctcacaggaagatccggaggttcaatttaattggtacgtcgatggtgttgaagtgcataatgcgaagactaagccgagagaggaacagttcaattccacttatcgcgtggtttcagtccttcaggtcttgcacgtggattggcttaacggaaaggaatataagtgcaaggtaagtaataaagggcttccatcaagcattgaaaaaaccataagtaaagcaaaaggacaaccgagggagccccaagtctacacgcttcctccttctcaggaggagatgaccaaaaaccaggtaagtttgacgtgtttggtaaaggggttttatccctcagatattgttgtcgaatgggagtctaatggtcagcctgagaacaattacaagactacgccacccgttctggattcagacggatctttcttcctctacagcaaattgacggtagacaaaagccgctggcaagagggcaatgtcttcagttgttctgtaatgcacgaagccctccataatcactacacgcagaaatctctgagcttgtctcttgggaaa

SEQ ID NO: 699 - DNA, 1146 bp, Artificial Sequence
  source: /note="Description of Artificial Sequence: Synthetic polynucleotide"
gcccctacgtcctcctcaactaaaaagacgcaacttcagcttgagaaccttcttctcgaccttcagatgattttgaacggaatcaataattacaaaaatcctaaacttactcagatgctcacgtttaagttttatatgccaaaaaaggccactgagttgaaacaccttcaatgcttggaggaggaacttaaaccacttgaggaagccttgaatcttgctccgtccaaaaactttcatttgcggccacgagatctgataagcaacatcaacgtgatcgtcctggaactgaaaggaagcgaaacgacgtttatgtgcgaatatgcagacgaaactgcgacaatcgttgaatttctcaatcgatggatcacttttagccaatctatcatcagcacgttgactggtggtggaggatcgggaggtggaggatctggaggaggaggatcgggtggaggaggatccgaaagtaagtatggccctccttgccctccgtgccctgcacctgagttcctcggcggtccttcagtgtttttgtttccacccaaacctaaagacacccttatgatctctcgaacacctgaagtaacctgtgtagttgttgatgtctcacaggaagatccggaggttcaatttaattggtacgtcgatggtgttgaagtgcataatgcgaagactaagccgagagaggaacagttcaattccacttatcgcgtggtttcagtccttcaggtcttgcacgtggattggcttaacggaaaggaatataagtgcaaggtaagtaataaagggcttccatcaagcattgaaaaaaccataagtaaagcaaaaggacaaccgagggagccccaagtctacacgcttcctccttctcaggaggagatgaccaaaaaccaggtaagtttgacgtgtttggtaaaggggttttatccctcagatattgttgtcgaatgggagtctaatggtcagcctgagaacaattacaagactacgccacccgttctggattcagacggatctttcttcctctacagcaaattgacggtagacaaaagccgctggcaagagggcaatgtcttcagttgttctgtaatgcacgaagccctccataatcactacacgcagaaatctctgagcttgtctcttgggaaa

SEQ ID NO: 700 - DNA, 1146 bp, Artificial Sequence
  source: /note="Description of Artificial Sequence: Synthetic polynucleotide"
gcccctacgtcctcctcaactaaaaagacgcaacttcagcttgagctgcttcttctcgaccttcagatgattttgaacggaatcaataattacaaaaatcctaaacttactcagatgctcacgtttaagttttatatgccaaaaaaggccactgagttgaaacaccttcaatgcttggaggaggaacttaaaccacttgaggaagccttgaatcttgctccgtccaaaaactttcatttgcggccacgagatctgataagcaacatcaacgtgatcgtcctggaactgaaaggaagcgaaacgacgtttatgtgcgaatatgcagacgaaactgcgacaatcgttgaatttctcaatcgatggatcacttttagccaatctatcatcagcacgttgactggtggtggaggatcgggaggtggaggatctggaggaggaggatcgggtggaggaggatccgaaagtaagtatggccctccttgccctccgtgccctgcacctgagttcctcggcggtccttcagtgtttttgtttccacccaaacctaaagacacccttatgatctctcgaacacctgaagtaacctgtgtagttgttgatgtctcacaggaagatccggaggttcaatttaattggtacgtcgatggtgttgaagtgcataatgcgaagactaagccgagagaggaacagttcaattccacttatcgcgtggtttcagtccttcaggtcttgcacgtggattggcttaacggaaaggaatataagtgcaaggtaagtaataaagggcttccatcaagcattgaaaaaaccataagtaaagcaaaaggacaaccgagggagccccaagtctacacgcttcctccttctcaggaggagatgaccaaaaaccaggtaagtttgacgtgtttggtaaaggggttttatccctcagatattgttgtcgaatgggagtctaatggtcagcctgagaacaattacaagactacgccacccgttctggattcagacggatctttcttcctctacagcaaattgacggtagacaaaagccgctggcaagagggcaatgtcttcagttgttctgtaatgcacgaagccctccataatcactacacgcagaaatctctgagcttgtctcttgggaaa

SEQ ID NO: 701 - DNA, 1146 bp, Artificial Sequence
  source: /note="Description of Artificial Sequence: Synthetic polynucleotide"
gcccctacgtcctcctcaactaaaaagacgcaacttcagcttgagcatcttcttctcgaccttcagatgattttgaacggaatcaataattacaaaaatcctaaacttactcagatgctcacgtttaagttttatatgccaaaaaaggccactgagttgaaacaccttcaatgcttggaggaggaacttaaaccacttgaggaagccttgaatcttgctccgtccaaaaactttcatttgcggccacgagtgctgataagcaacatcaacgtgatcgtcctggaactgaaaggaagcgaaacgacgtttatgtgcgaatatgcagacgaaactgcgacaatcgttgaatttctcaatcgatggatcacttttagccaatctatcatcagcacgttgactggtggtggaggatcgggaggtggaggatctggaggaggaggatcgggtggaggaggatccgaaagtaagtatggccctccttgccctccgtgccctgcacctgagttcctcggcggtccttcagtgtttttgtttccacccaaacctaaagacacccttatgatctctcgaacacctgaagtaacctgtgtagttgttgatgtctcacaggaagatccggaggttcaatttaattggtacgtcgatggtgttgaagtgcataatgcgaagactaagccgagagaggaacagttcaattccacttatcgcgtggtttcagtccttcaggtcttgcacgtggattggcttaacggaaaggaatataagtgcaaggtaagtaataaagggcttccatcaagcattgaaaaaaccataagtaaagcaaaaggacaaccgagggagccccaagtctacacgcttcctccttctcaggaggagatgaccaaaaaccaggtaagtttgacgtgtttggtaaaggggttttatccctcagatattgttgtcgaatgggagtctaatggtcagcctgagaacaattacaagactacgccacccgttctggattcagacggatctttcttcctctacagcaaattgacggtagacaaaagccgctggcaagagggcaatgtcttcagttgttctgtaatgcacgaagccctccataatcactacacgcagaaatctctgagcttgtctcttgggaaa

SEQ ID NO: 702 - DNA, 1146 bp, Artificial Sequence
  source: /note="Description of Artificial Sequence: Synthetic polynucleotide"
gcccctacgtcctcctcaactaaaaagacgcaacttcagcttgagcatcttcttctcgaccttcagatgattttgaacggaatcaataattacaaaaatcctaaacttactcagatgctcacgtttaagttttatatgccaaaaaaggccactgagttgaaacaccttcaatgcttggaggaggaacttaaaccacttgaggaagccttgaatcttgctccgtccaaaaactttcatttgcggccacgagatctgataagcaacatcaacgtgagcgtcctggaactgaaaggaagcgaaacgacgtttatgtgcgaatatgcagacgaaactgcgacaatcgttgaatttctcaatcgatggatcacttttagccaatctatcatcagcacgttgactggtggtggaggatcgggaggtggaggatctggaggaggaggatcgggtggaggaggatccgaaagtaagtatggccctccttgccctccgtgccctgcacctgagttcctcggcggtccttcagtgtttttgtttccacccaaacctaaagacacccttatgatctctcgaacacctgaagtaacctgtgtagttgttgatgtctcacaggaagatccggaggttcaatttaattggtacgtcgatggtgttgaagtgcataatgcgaagactaagccgagagaggaacagttcaattccacttatcgcgtggtttcagtccttcaggtcttgcacgtggattggcttaacggaaaggaatataagtgcaaggtaagtaataaagggcttccatcaagcattgaaaaaaccataagtaaagcaaaaggacaaccgagggagccccaagtctacacgcttcctccttctcaggaggagatgaccaaaaaccaggtaagtttgacgtgtttggtaaaggggttttatccctcagatattgttgtcgaatgggagtctaatggtcagcctgagaacaattacaagactacgccacccgttctggattcagacggatctttcttcctctacagcaaattgacggtagacaaaagccgctggcaagagggcaatgtcttcagttgttctgtaatgcacgaagccctccataatcactacacgcagaaatctctgagcttgtctcttgggaaa

SEQ ID NO: 703 - DNA, 1146 bp, Artificial Sequence
  source: /note="Description of Artificial Sequence: Synthetic polynucleotide"
gcccctacgtcctcctcaactaaaaagacgcaacttcagcttgagcatcttcttctcgaccttcagatgattttgaacggaatcaataattacaaaaatcctaaacttactaacatgctcacgtttaagttttatatgccaaaaaaggccactgagttgaaacaccttcaatgcttggaggaggaacttaaaccacttgaggaagccttgaatcttgctccgtccaaaaactttcatttgcggccacgagatctgataagcaacatcaacgtgatcgtcctggaactgaaaggaagcgaaacgacgtttatgtgcgaatatgcagacgaaactgcgacaatcgttgaatttctcaatcgatggatcacttttagccaatctatcatcagcacgttgactggtggtggaggatcgggaggtggaggatctggaggaggaggatcgggtggaggaggatccgaaagtaagtatggccctccttgccctccgtgccctgcacctgagttcctcggcggtccttcagtgtttttgtttccacccaaacctaaagacacccttatgatctctcgaacacctgaagtaacctgtgtagttgttgatgtctcacaggaagatccggaggttcaatttaattggtacgtcgatggtgttgaagtgcataatgcgaagactaagccgagagaggaacagttcaattccacttatcgcgtggtttcagtccttcaggtcttgcacgtggattggcttaacggaaaggaatataagtgcaaggtaagtaataaagggcttccatcaagcattgaaaaaaccataagtaaagcaaaaggacaaccgagggagccccaagtctacacgcttcctccttctcaggaggagatgaccaaaaaccaggtaagtttgacgtgtttggtaaaggggttttatccctcagatattgttgtcgaatgggagtctaatggtcagcctgagaacaattacaagactacgccacccgttctggattcagacggatctttcttcctctacagcaaattgacggtagacaaaagccgctggcaagagggcaatgtcttcagttgttctgtaatgcacgaagccctccataatcactacacgcagaaatctctgagcttgtctcttgggaaa

SEQ ID NO: 704 - DNA, 1146 bp, Artificial Sequence
  source: /note="Description of Artificial Sequence: Synthetic polynucleotide"
gcccctacgtcctcctcaactaaaaagacgcaacttcagcttgagaaccttcttctcgaccttcagatgattttgaacggaatcaataattacaaaaatcctaaacttactaacatgctcacgtttaagttttatatgccaaaaaaggccactgagttgaaacaccttcaatgcttggaggaggaacttaaaccacttgaggaagccttgaatcttgctccgtccaaaaactttcatttgcggccacgagatctgataagcaacatcaacgtgatcgtcctggaactgaaaggaagcgaaacgacgtttatgtgcgaatatgcagacgaaactgcgacaatcgttgaatttctcaatcgatggatcacttttagccaatctatcatcagcacgttgactggtggtggaggatcgggaggtggaggatctggaggaggaggatcgggtggaggaggatccgaaagtaagtatggccctccttgccctccgtgccctgcacctgagttcctcggcggtccttcagtgtttttgtttccacccaaacctaaagacacccttatgatctctcgaacacctgaagtaacctgtgtagttgttgatgtctcacaggaagatccggaggttcaatttaattggtacgtcgatggtgttgaagtgcataatgcgaagactaagccgagagaggaacagttcaattccacttatcgcgtggtttcagtccttcaggtcttgcacgtggattggcttaacggaaaggaatataagtgcaaggtaagtaataaagggcttccatcaagcattgaaaaaaccataagtaaagcaaaaggacaaccgagggagccccaagtctacacgcttcctccttctcaggaggagatgaccaaaaaccaggtaagtttgacgtgtttggtaaaggggttttatccctcagatattgttgtcgaatgggagtctaatggtcagcctgagaacaattacaagactacgccacccgttctggattcagacggatctttcttcctctacagcaaattgacggtagacaaaagccgctggcaagagggcaatgtcttcagttgttctgtaatgcacgaagccctccataatcactacacgcagaaatctctgagcttgtctcttgggaaa

SEQ ID NO: 705 - DNA, 1146 bp, Artificial Sequence
  source: /note="Description of Artificial Sequence: Synthetic polynucleotide"
gcccctacgtcctcctcaactaaaaagacgcaacttcagcttgagttgcttcttctcgaccttcagatgattttgaacggaatcaataattacaaaaatcctaaacttactaacatgctcacgtttaagttttatatgccaaaaaaggccactgagttgaaacaccttcaatgcttggaggaggaacttaaaccacttgaggaagccttgaatcttgctccgtccaaaaactttcatttgcggccacgagatctgataagcaacatcaacgtgatcgtcctggaactgaaaggaagcgaaacgacgtttatgtgcgaatatgcagacgaaactgcgacaatcgttgaatttctcaatcgatggatcacttttagccaatctatcatcagcacgttgactggtggtggaggatcgggaggtggaggatctggaggaggaggatcgggtggaggaggatccgaaagtaagtatggccctccttgccctccgtgccctgcacctgagttcctcggcggtccttcagtgtttttgtttccacccaaacctaaagacacccttatgatctctcgaacacctgaagtaacctgtgtagttgttgatgtctcacaggaagatccggaggttcaatttaattggtacgtcgatggtgttgaagtgcataatgcgaagactaagccgagagaggaacagttcaattccacttatcgcgtggtttcagtccttcaggtcttgcacgtggattggcttaacggaaaggaatataagtgcaaggtaagtaataaagggcttccatcaagcattgaaaaaaccataagtaaagcaaaaggacaaccgagggagccccaagtctacacgcttcctccttctcaggaggagatgaccaaaaaccaggtaagtttgacgtgtttggtaaaggggttttatccctcagatattgttgtcgaatgggagtctaatggtcagcctgagaacaattacaagactacgccacccgttctggattcagacggatctttcttcctctacagcaaattgacggtagacaaaagccgctggcaagagggcaatgtcttcagttgttctgtaatgcacgaagccctccataatcactacacgcagaaatctctgagcttgtctcttgggaaa

SEQ ID NO: 706 - DNA, 1146 bp, Artificial Sequence
  source: /note="Description of Artificial Sequence: Synthetic polynucleotide"
gcccctacgtcctcctcaactaaaaagacgcaacttcagcttgagcatcttcttctcgaccttcagatgattttgaacggaatcaataattacaaaaatcctaaacttactaacatgctcacgtttaagttttatatgccaaaaaaggccactgagttgaaacaccttcaatgcttggaggaggaacttaaaccacttgaggaagccttgaatcttgctccgtccaaaaactttcatttgcggccacgagtcctgataagcaacatcaacgtgatcgtcctggaactgaaaggaagcgaaacgacgtttatgtgcgaatatgcagacgaaactgcgacaatcgttgaatttctcaatcgatggatcacttttagccaatctatcatcagcacgttgactggtggtggaggatcgggaggtggaggatctggaggaggaggatcgggtggaggaggatccgaaagtaagtatggccctccttgccctccgtgccctgcacctgagttcctcggcggtccttcagtgtttttgtttccacccaaacctaaagacacccttatgatctctcgaacacctgaagtaacctgtgtagttgttgatgtctcacaggaagatccggaggttcaatttaattggtacgtcgatggtgttgaagtgcataatgcgaagactaagccgagagaggaacagttcaattccacttatcgcgtggtttcagtccttcaggtcttgcacgtggattggcttaacggaaaggaatataagtgcaaggtaagtaataaagggcttccatcaagcattgaaaaaaccataagtaaagcaaaaggacaaccgagggagccccaagtctacacgcttcctccttctcaggaggagatgaccaaaaaccaggtaagtttgacgtgtttggtaaaggggttttatccctcagatattgttgtcgaatgggagtctaatggtcagcctgagaacaattacaagactacgccacccgttctggattcagacggatctttcttcctctacagcaaattgacggtagacaaaagccgctggcaagagggcaatgtcttcagttgttctgtaatgcacgaagccctccataatcactacacgcagaaatctctgagcttgtctcttgggaaa

SEQ ID NO: 707 - DNA, 1146 bp, Artificial Sequence
  source: /note="Description of Artificial Sequence: Synthetic polynucleotide"
gcccctacgtcctcctcaactaaaaagacgcaacttcagcttgagcatcttcttctcgaccttcagatgattttgaacggaatcaataattacaaaaatcctaaacttactaacatgctcacgtttaagttttatatgccaaaaaaggccactgagttgaaacaccttcaatgcttggaggaggaacttaaaccacttgaggaagccttgaatcttgctccgtccaaaaactttcatttgcggccacgagatctgataagcaacatcaacgtgagcgtcctggaactgaaaggaagcgaaacgacgtttatgtgcgaatatgcagacgaaactgcgacaatcgttgaatttctcaatcgatggatcacttttagccaatctatcatcagcacgttgactggtggtggaggatcgggaggtggaggatctggaggaggaggatcgggtggaggaggatccgaaagtaagtatggccctccttgccctccgtgccctgcacctgagttcctcggcggtccttcagtgtttttgtttccacccaaacctaaagacacccttatgatctctcgaacacctgaagtaacctgtgtagttgttgatgtctcacaggaagatccggaggttcaatttaattggtacgtcgatggtgttgaagtgcataatgcgaagactaagccgagagaggaacagttcaattccacttatcgcgtggtttcagtccttcaggtcttgcacgtggattggcttaacggaaaggaatataagtgcaaggtaagtaataaagggcttccatcaagcattgaaaaaaccataagtaaagcaaaaggacaaccgagggagccccaagtctacacgcttcctccttctcaggaggagatgaccaaaaaccaggtaagtttgacgtgtttggtaaaggggttttatccctcagatattgttgtcgaatgggagtctaatggtcagcctgagaacaattacaagactacgccacccgttctggattcagacggatctttcttcctctacagcaaattgacggtagacaaaagccgctggcaagagggcaatgtcttcagttgttctgtaatgcacgaagccctccataatcactacacgcagaaatctctgagcttgtctcttgggaaa

SEQ ID NO: 708 - DNA, 1146 bp, Artificial Sequence
  source: /note="Description of Artificial Sequence: Synthetic polynucleotide"
gcccctacgtcctcctcaactaaaaagacgcaacttcagcttgagcatcttcttctcgaccttcagatgattttgaacggaatcaataattacaaaaatcctaaacttactgaaatgctcacgtttaagttttatatgccaaaaaaggccactgagttgaaacaccttcaatgcttggaggaggaacttaaaccacttgaggaagccttgaatcttgctccgtccaaaaactttcatttgcggccacgagatctgataagcaacatcaacgtgatcgtcctggaactgaaaggaagcgaaacgacgtttatgtgcgaatatgcagacgaaactgcgacaatcgttgaatttctcaatcgatggatcacttttagccaatctatcatcagcacgttgactggtggtggaggatcgggaggtggaggatctggaggaggaggatcgggtggaggaggatccgaaagtaagtatggccctccttgccctccgtgccctgcacctgagttcctcggcggtccttcagtgtttttgtttccacccaaacctaaagacacccttatgatctctcgaacacctgaagtaacctgtgtagttgttgatgtctcacaggaagatccggaggttcaatttaattggtacgtcgatggtgttgaagtgcataatgcgaagactaagccgagagaggaacagttcaattccacttatcgcgtggtttcagtccttcaggtcttgcacgtggattggcttaacggaaaggaatataagtgcaaggtaagtaataaagggcttccatcaagcattgaaaaaaccataagtaaagcaaaaggacaaccgagggagccccaagtctacacgcttcctccttctcaggaggagatgaccaaaaaccaggtaagtttgacgtgtttggtaaaggggttttatccctcagatattgttgtcgaatgggagtctaatggtcagcctgagaacaattacaagactacgccacccgttctggattcagacggatctttcttcctctacagcaaattgacggtagacaaaagccgctggcaagagggcaatgtcttcagttgttctgtaatgcacgaagccctccataatcactacacgcagaaatctctgagcttgtctcttgggaaa

SEQ ID NO: 709 - DNA, 1146 bp, Artificial Sequence
  source: /note="Description of Artificial Sequence: Synthetic polynucleotide"
gcccctacgtcctcctcaactaaaaagacgcaacttcagcttgagcatcttcttctcgaccttcagatgattttgaacggaatcaataattacaaaaatcctaaacttactagaatgctcacgaagaagttttatatgccaaaaaaggccactgagttgaaacaccttcaatgcttggaggaggaacttaaaccacttgaggaagccttgaatcttgctccgtccaaaaactttcatttgcggccacgagatctgataagcaacatcaacgtgatcgtcctggaactgaaaggaagcgaaacgacgtttatgtgcgaatatgcagacgaaactgcgacaatcgttgaatttctcaatcgatggatcacttttagccaatctatcatcagcacgttgactggtggtggaggatcgggaggtggaggatctggaggaggaggatcgggtggaggaggatccgaaagtaagtatggccctccttgccctccgtgccctgcacctgagttcctcggcggtccttcagtgtttttgtttccacccaaacctaaagacacccttatgatctctcgaacacctgaagtaacctgtgtagttgttgatgtctcacaggaagatccggaggttcaatttaattggtacgtcgatggtgttgaagtgcataatgcgaagactaagccgagagaggaacagttcaattccacttatcgcgtggtttcagtccttcaggtcttgcacgtggattggcttaacggaaaggaatataagtgcaaggtaagtaataaagggcttccatcaagcattgaaaaaaccataagtaaagcaaaaggacaaccgagggagccccaagtctacacgcttcctccttctcaggaggagatgaccaaaaaccaggtaagtttgacgtgtttggtaaaggggttttatccctcagatattgttgtcgaatgggagtctaatggtcagcctgagaacaattacaagactacgccacccgttctggattcagacggatctttcttcctctacagcaaattgacggtagacaaaagccgctggcaagagggcaatgtcttcagttgttctgtaatgcacgaagccctccataatcactacacgcagaaatctctgagcttgtctcttgggaaa

SEQ ID NO: 710 - DNA, 1146 bp, Artificial Sequence
  source: /note="Description of Artificial Sequence: Synthetic polynucleotide"
gcccctacgtcctcctcaactaaaaagacgcaacttcagcttgagcatcttcttctcgaccttcagatgattttgaacggaatcaataattacaaaaatcctaaacttactagaatgctcacgcagaagttttatatgccaaaaaaggccactgagttgaaacaccttcaatgcttggaggaggaacttaaaccacttgaggaagccttgaatcttgctccgtccaaaaactttcatttgcggccacgagatctgataagcaacatcaacgtgatcgtcctggaactgaaaggaagcgaaacgacgtttatgtgcgaatatgcagacgaaactgcgacaatcgttgaatttctcaatcgatggatcacttttagccaatctatcatcagcacgttgactggtggtggaggatcgggaggtggaggatctggaggaggaggatcgggtggaggaggatccgaaagtaagtatggccctccttgccctccgtgccctgcacctgagttcctcggcggtccttcagtgtttttgtttccacccaaacctaaagacacccttatgatctctcgaacacctgaagtaacctgtgtagttgttgatgtctcacaggaagatccggaggttcaatttaattggtacgtcgatggtgttgaagtgcataatgcgaagactaagccgagagaggaacagttcaattccacttatcgcgtggtttcagtccttcaggtcttgcacgtggattggcttaacggaaaggaatataagtgcaaggtaagtaataaagggcttccatcaagcattgaaaaaaccataagtaaagcaaaaggacaaccgagggagccccaagtctacacgcttcctccttctcaggaggagatgaccaaaaaccaggtaagtttgacgtgtttggtaaaggggttttatccctcagatattgttgtcgaatgggagtctaatggtcagcctgagaacaattacaagactacgccacccgttctggattcagacggatctttcttcctctacagcaaattgacggtagacaaaagccgctggcaagagggcaatgtcttcagttgttctgtaatgcacgaagccctccataatcactacacgcagaaatctctgagcttgtctcttgggaaa

SEQ ID NO: 711 - DNA, 1146 bp, Artificial Sequence
  source: /note="Description of Artificial Sequence: Synthetic polynucleotide"
gcccctacgtcctcctcaactaaaaagacgcaacttcagcttgagcatcttcttctcgaccttcagatgattttgaacggaatcaataattacaaaaatcctaaacttactagaatgctcacggcaaagtttgctatgccaaaaaaggccactgagttgaaacaccttcaatgcttggaggaggaacttaaaccacttgaggaagccttgaatggtgctccgtccaaaaactttcatttgcggccacgagatctgataagcgatatcaacgtgatcgtcctggaactgaaaggaagcgaaacgacgtttatgtgcgaatatgcagacgaaactgcgacaatcgttgaatttctcaatcgatggatcacttttagccaatctatcatcagcacgttgactggtggtggaggatcgggaggtggaggatctggaggaggaggatcgggtggaggaggatccgaaagtaagtatggccctccttgccctccgtgccctgcacctgagttcctcggcggtccttcagtgtttttgtttccacccaaacctaaagacacccttatgatctctcgaacacctgaagtaacctgtgtagttgttgatgtctcacaggaagatccggaggttcaatttaattggtacgtcgatggtgttgaagtgcataatgcgaagactaagccgagagaggaacagttcaattccacttatcgcgtggtttcagtccttcaggtcttgcacgtggattggcttaacggaaaggaatataagtgcaaggtaagtaataaagggcttccatcaagcattgaaaaaaccataagtaaagcaaaaggacaaccgagggagccccaagtctacacgcttcctccttctcaggaggagatgaccaaaaaccaggtaagtttgacgtgtttggtaaaggggttttatccctcagatattgttgtcgaatgggagtctaatggtcagcctgagaacaattacaagactacgccacccgttctggattcagacggatctttcttcctctacagcaaattgacggtagacaaaagccgctggcaagagggcaatgtcttcagttgttctgtaatgcacgaagccctccataatcactacacgcagaaatctctgagcttgtctcttgggaaa

SEQ ID NO: 712 - DNA, 1146 bp, Artificial Sequence
  source: /note="Description of Artificial Sequence: Synthetic polynucleotide"
gcccctacgtcctcctcaactaaaaagacgcaacttcagcttgagcatcttcttctcgaccttcagatgattttgaacggaatcaataattacaaaaatcctaaacttactaacatgctcacgtttaagttttatatgccaaaaaaggccactgagttgaaacaccttcaatgcttggaggaggaacttaaaccacttgaggaagccttgaatcttgctccgtccaaaaactttcatttgcggccacgagatctgataaggaacatcaacgtgatcgtcctggaactgaaaggaagcgaaacgacgtttatgtgcgaatatgcagacgaaactgcgacaatcgttgaatttctcaatcgatggatcacttttagccaatctatcatcagcacgttgactggtggtggaggatcgggaggtggaggatctggaggaggaggatcgggtggaggaggatccgaaagtaagtatggccctccttgccctccgtgccctgcacctgagttcctcggcggtccttcagtgtttttgtttccacccaaacctaaagacacccttatgatctctcgaacacctgaagtaacctgtgtagttgttgatgtctcacaggaagatccggaggttcaatttaattggtacgtcgatggtgttgaagtgcataatgcgaagactaagccgagagaggaacagttcaattccacttatcgcgtggtttcagtccttcaggtcttgcacgtggattggcttaacggaaaggaatataagtgcaaggtaagtaataaagggcttccatcaagcattgaaaaaaccataagtaaagcaaaaggacaaccgagggagccccaagtctacacgcttcctccttctcaggaggagatgaccaaaaaccaggtaagtttgacgtgtttggtaaaggggttttatccctcagatattgttgtcgaatgggagtctaatggtcagcctgagaacaattacaagactacgccacccgttctggattcagacggatctttcttcctctacagcaaattgacggtagacaaaagccgctggcaagagggcaatgtcttcagttgttctgtaatgcacgaagccctccataatcactacacgcagaaatctctgagcttgtctcttgggaaa

SEQ ID NO: 713 - DNA, 1146 bp, Artificial Sequence
  source: /note="Description of Artificial Sequence: Synthetic polynucleotide"
gcccctacgtcctcctcaactaaaaagacgcaacttcagcttgagaaccttcttctcgaccttcagatgattttgaacggaatcaataattacaaaaatcctaaacttactgaaatgctcacgtttaagttttatatgccaaaaaaggccactgagttgaaacaccttcaatgcttggaggaggaacttaaaccacttgaggaagccttgaatcttgctccgtccaaaaactttcatttgcggccacgagatctgataagcaacatcaacgtgatcgtcctggaactgaaaggaagcgaaacgacgtttatgtgcgaatatgcagacgaaactgcgacaatcgttgaatttctcaatcgatggatcacttttagccaatctatcatcagcacgttgactggtggtggaggatcgggaggtggaggatctggaggaggaggatcgggtggaggaggatccgaaagtaagtatggccctccttgccctccgtgccctgcacctgagttcctcggcggtccttcagtgtttttgtttccacccaaacctaaagacacccttatgatctctcgaacacctgaagtaacctgtgtagttgttgatgtctcacaggaagatccggaggttcaatttaattggtacgtcgatggtgttgaagtgcataatgcgaagactaagccgagagaggaacagttcaattccacttatcgcgtggtttcagtccttcaggtcttgcacgtggattggcttaacggaaaggaatataagtgcaaggtaagtaataaagggcttccatcaagcattgaaaaaaccataagtaaagcaaaaggacaaccgagggagccccaagtctacacgcttcctccttctcaggaggagatgaccaaaaaccaggtaagtttgacgtgtttggtaaaggggttttatccctcagatattgttgtcgaatgggagtctaatggtcagcctgagaacaattacaagactacgccacccgttctggattcagacggatctttcttcctctacagcaaattgacggtagacaaaagccgctggcaagagggcaatgtcttcagttgttctgtaatgcacgaagccctccataatcactacacgcagaaatctctgagcttgtctcttgggaaa

SEQ ID NO: 714 - DNA, 1146 bp, Artificial Sequence
  source: /note="Description of Artificial Sequence: Synthetic polynucleotide"
gcccctacgtcctcctcaactaaaaagacgcaacttcagcttgagcatcttcttctcgaccttcagatgattttgaacggaatcaataattacaaaaatcctaaacttactgaaatgctcacgtttaagttttatatgccaaaaaaggccactgagttgaaacaccttcaatgcttggaggaggaacttaaaccacttgaggaagccttgaatcttgctccgtccaaaaactttcatttgcggccacgagtcctgataagcaacatcaacgtgatcgtcctggaactgaaaggaagcgaaacgacgtttatgtgcgaatatgcagacgaaactgcgacaatcgttgaatttctcaatcgatggatcacttttagccaatctatcatcagcacgttgactggtggtggaggatcgggaggtggaggatctggaggaggaggatcgggtggaggaggatccgaaagtaagtatggccctccttgccctccgtgccctgcacctgagttcctcggcggtccttcagtgtttttgtttccacccaaacctaaagacacccttatgatctctcgaacacctgaagtaacctgtgtagttgttgatgtctcacaggaagatccggaggttcaatttaattggtacgtcgatggtgttgaagtgcataatgcgaagactaagccgagagaggaacagttcaattccacttatcgcgtggtttcagtccttcaggtcttgcacgtggattggcttaacggaaaggaatataagtgcaaggtaagtaataaagggcttccatcaagcattgaaaaaaccataagtaaagcaaaaggacaaccgagggagccccaagtctacacgcttcctccttctcaggaggagatgaccaaaaaccaggtaagtttgacgtgtttggtaaaggggttttatccctcagatattgttgtcgaatgggagtctaatggtcagcctgagaacaattacaagactacgccacccgttctggattcagacggatctttcttcctctacagcaaattgacggtagacaaaagccgctggcaagagggcaatgtcttcagttgttctgtaatgcacgaagccctccataatcactacacgcagaaatctctgagcttgtctcttgggaaa

SEQ ID NO: 715 - DNA, 1146 bp, Artificial Sequence
  source: /note="Description of Artificial Sequence: Synthetic polynucleotide"
gcccctacgtcctcctcaactaaaaagacgcaacttcagcttgagcatcttcttctcgaccttcagatgattttgaacggaatcaataattacaaaaatcctaaacttactgaaatgctcacgtttaagttttatatgccaaaaaaggccactgagttgaaacaccttcaatgcttggaggaggaacttaaaccacttgaggaagccttgaatcttgctccgtccaaaaactttcatttgcggccacgagatctgataaggaacatcaacgtgatcgtcctggaactgaaaggaagcgaaacgacgtttatgtgcgaatatgcagacgaaactgcgacaatcgttgaatttctcaatcgatggatcacttttagccaatctatcatcagcacgttgactggtggtggaggatcgggaggtggaggatctggaggaggaggatcgggtggaggaggatccgaaagtaagtatggccctccttgccctccgtgccctgcacctgagttcctcggcggtccttcagtgtttttgtttccacccaaacctaaagacacccttatgatctctcgaacacctgaagtaacctgtgtagttgttgatgtctcacaggaagatccggaggttcaatttaattggtacgtcgatggtgttgaagtgcataatgcgaagactaagccgagagaggaacagttcaattccacttatcgcgtggtttcagtccttcaggtcttgcacgtggattggcttaacggaaaggaatataagtgcaaggtaagtaataaagggcttccatcaagcattgaaaaaaccataagtaaagcaaaaggacaaccgagggagccccaagtctacacgcttcctccttctcaggaggagatgaccaaaaaccaggtaagtttgacgtgtttggtaaaggggttttatccctcagatattgttgtcgaatgggagtctaatggtcagcctgagaacaattacaagactacgccacccgttctggattcagacggatctttcttcctctacagcaaattgacggtagacaaaagccgctggcaagagggcaatgtcttcagttgttctgtaatgcacgaagccctccataatcactacacgcagaaatctctgagcttgtctcttgggaaa

SEQ ID NO: 716 - DNA, 1146 bp, Artificial Sequence
  source: /note="Description of Artificial Sequence: Synthetic polynucleotide"
gcccctacgtcctcctcaactaaaaagacgcaacttcagcttgagcatcttcttctcgaccttcagatgattttgaacggaatcaataattacaaaaatcctaaacttactgaaatgctcacgtttaagttttatatgccaaaaaaggccactgagttgaaacaccttcaatgcttggaggaggaacttaaaccacttgaggaagccttgaatcttgctccgtccaaaaactttcatttgcggccacgagatctgataagcaacatcaacgtgagcgtcctggaactgaaaggaagcgaaacgacgtttatgtgcgaatatgcagacgaaactgcgacaatcgttgaatttctcaatcgatggatcacttttagccaatctatcatcagcacgttgactggtggtggaggatcgggaggtggaggatctggaggaggaggatcgggtggaggaggatccgaaagtaagtatggccctccttgccctccgtgccctgcacctgagttcctcggcggtccttcagtgtttttgtttccacccaaacctaaagacacccttatgatctctcgaacacctgaagtaacctgtgtagttgttgatgtctcacaggaagatccggaggttcaatttaattggtacgtcgatggtgttgaagtgcataatgcgaagactaagccgagagaggaacagttcaattccacttatcgcgtggtttcagtccttcaggtcttgcacgtggattggcttaacggaaaggaatataagtgcaaggtaagtaataaagggcttccatcaagcattgaaaaaaccataagtaaagcaaaaggacaaccgagggagccccaagtctacacgcttcctccttctcaggaggagatgaccaaaaaccaggtaagtttgacgtgtttggtaaaggggttttatccctcagatattgttgtcgaatgggagtctaatggtcagcctgagaacaattacaagactacgccacccgttctggattcagacggatctttcttcctctacagcaaattgacggtagacaaaagccgctggcaagagggcaatgtcttcagttgttctgtaatgcacgaagccctccataatcactacacgcagaaatctctgagcttgtctcttgggaaa

SEQ ID NO: 717 - DNA, 1146 bp, Artificial Sequence
  source: /note="Description of Artificial Sequence: Synthetic polynucleotide"
gcccctacgtcctcctcaactaaaaagacgcaacttcagcttgagaaccttcttctcgaccttcagatgattttgaacggaatcaataattacaaaaatcctaaacttactagaatgctcacgcagaagttttatatgccaaaaaaggccactgagttgaaacaccttcaatgcttggaggaggaacttaaaccacttgaggaagccttgaatcttgctccgtccaaaaactttcatttgcggccacgagatctgataagcaacatcaacgtgatcgtcctggaactgaaaggaagcgaaacgacgtttatgtgcgaatatgcagacgaaactgcgacaatcgttgaatttctcaatcgatggatcacttttagccaatctatcatcagcacgttgactggtggtggaggatcgggaggtggaggatctggaggaggaggatcgggtggaggaggatccgaaagtaagtatggccctccttgccctccgtgccctgcacctgagttcctcggcggtccttcagtgtttttgtttccacccaaacctaaagacacccttatgatctctcgaacacctgaagtaacctgtgtagttgttgatgtctcacaggaagatccggaggttcaatttaattggtacgtcgatggtgttgaagtgcataatgcgaagactaagccgagagaggaacagttcaattccacttatcgcgtggtttcagtccttcaggtcttgcacgtggattggcttaacggaaaggaatataagtgcaaggtaagtaataaagggcttccatcaagcattgaaaaaaccataagtaaagcaaaaggacaaccgagggagccccaagtctacacgcttcctccttctcaggaggagatgaccaaaaaccaggtaagtttgacgtgtttggtaaaggggttttatccctcagatattgttgtcgaatgggagtctaatggtcagcctgagaacaattacaagactacgccacccgttctggattcagacggatctttcttcctctacagcaaattgacggtagacaaaagccgctggcaagagggcaatgtcttcagttgttctgtaatgcacgaagccctccataatcactacacgcagaaatctctgagcttgtctcttgggaaa

SEQ ID NO: 718 - DNA, 1146 bp, Artificial Sequence
  source: /note="Description of Artificial Sequence: Synthetic polynucleotide"
gcccctacgtcctcctcaactaaaaagacgcaacttcagcttgagcatcttcttctcgaccttcagatgattttgaacggaatcaataattacaaaaatcctaaacttactagaatgctcacgcagaagttttatatgccaaaaaaggccactgagttgaaacaccttcaatgcttggaggaggaacttaaaccacttgaggaagccttgaatcttgctccgtccaaaaactttcatttgcggccacgagatctgataagcaacatcaacgtgagcgtcctggaactgaaaggaagcgaaacgacgtttatgtgcgaatatgcagacgaaactgcgacaatcgttgaatttctcaatcgatggatcacttttagccaatctatcatcagcacgttgactggtggtggaggatcgggaggtggaggatctggaggaggaggatcgggtggaggaggatccgaaagtaagtatggccctccttgccctccgtgccctgcacctgagttcctcggcggtccttcagtgtttttgtttccacccaaacctaaagacacccttatgatctctcgaacacctgaagtaacctgtgtagttgttgatgtctcacaggaagatccggaggttcaatttaattggtacgtcgatggtgttgaagtgcataatgcgaagactaagccgagagaggaacagttcaattccacttatcgcgtggtttcagtccttcaggtcttgcacgtggattggcttaacggaaaggaatataagtgcaaggtaagtaataaagggcttccatcaagcattgaaaaaaccataagtaaagcaaaaggacaaccgagggagccccaagtctacacgcttcctccttctcaggaggagatgaccaaaaaccaggtaagtttgacgtgtttggtaaaggggttttatccctcagatattgttgtcgaatgggagtctaatggtcagcctgagaacaattacaagactacgccacccgttctggattcagacggatctttcttcctctacagcaaattgacggtagacaaaagccgctggcaagagggcaatgtcttcagttgttctgtaatgcacgaagccctccataatcactacacgcagaaatctctgagcttgtctcttgggaaa

SEQ ID NO: 719 - DNA, 1146 bp, Artificial Sequence
  source: /note="Description of Artificial Sequence: Synthetic polynucleotide"
gcccctacgtcctcctcaactaaaaagacgcaacttcagcttgagaaccttcttctcgaccttcagatgattttgaacggaatcaataattacaaaaatcctgaacttactaacatgctcacgtttaagttttatatgccaaaaaaggccactgagttgaaacaccttcaatgcttggaggaggaacttaaaccacttgaggaagccttgaatcttgctccgtccaaaaactttcatttgcggccacgagatctgataagcaacatcaacgtgatcgtcctggaactgaaaggaagcgaaacgacgtttatgtgcgaatatgcagacgaaactgcgacaatcgttgaatttctcaatcgatggatcacttttagccaatctatcatcagcacgttgactggtggtggaggatcgggaggtggaggatctggaggaggaggatcgggtggaggaggatccgaaagtaagtatggccctccttgccctccgtgccctgcacctgagttcctcggcggtccttcagtgtttttgtttccacccaaacctaaagacacccttatgatctctcgaacacctgaagtaacctgtgtagttgttgatgtctcacaggaagatccggaggttcaatttaattggtacgtcgatggtgttgaagtgcataatgcgaagactaagccgagagaggaacagttcaattccacttatcgcgtggtttcagtccttcaggtcttgcacgtggattggcttaacggaaaggaatataagtgcaaggtaagtaataaagggcttccatcaagcattgaaaaaaccataagtaaagcaaaaggacaaccgagggagccccaagtctacacgcttcctccttctcaggaggagatgaccaaaaaccaggtaagtttgacgtgtttggtaaaggggttttatccctcagatattgttgtcgaatgggagtctaatggtcagcctgagaacaattacaagactacgccacccgttctggattcagacggatctttcttcctctacagcaaattgacggtagacaaaagccgctggcaagagggcaatgtcttcagttgttctgtaatgcacgaagccctccataatcactacacgcagaaatctctgagcttgtctcttgggaaa

SEQ ID NO: 720-999 - skipped (280 entries)

SEQ ID NO: 1000 - protein, 133 aa, Artificial Sequence
  source: /note="Description of Artificial Sequence: Synthetic polypeptide"
APASSSTKKTQLQLENLLLDLQMILNGINNYKNPKLTRMLTFKFYMPKKATELKHLQCLEEELKPLEEALNLAPSKNFHLRPRDLISNINVIVLELKGSETTFMCEYADETATIVEFLNRWITFSQSIISTLT

SEQ ID NO: 1001 - protein, 133 aa, Artificial Sequence
  source: /note="Description of Artificial Sequence: Synthetic polypeptide"
APASSSTKKTQLQLELLLLDLQMILNGINNYKNPKLTRMLTFKFYMPKKATELKHLQCLEEELKPLEEALNLAPSKNFHLRPRDLISNINVIVLELKGSETTFMCEYADETATIVEFLNRWITFSQSIISTLT

SEQ ID NO: 1002 - protein, 133 aa, Artificial Sequence
  source: /note="Description of Artificial Sequence: Synthetic polypeptide"
APASSSTKKTQLQLEHLLLDLQMILNGINNYKNPKLTRMLTFKFYMPKKATELKHLQCLEEELKPLEEALNLAPSKNFHLRPRDLISNINVSVLELKGSETTFMCEYADETATIVEFLNRWITFSQSIISTLT

SEQ ID NO: 1003 - protein, 227 aa, Artificial Sequence
  source: /note="Description of Artificial Sequence: Synthetic polypeptide"
DKTHTCPPCPAPELLGGPSVFLFPPKPKDTLMISRTPEVTCVVVDVSHEDPEVKFNWYVDGVEVHNAKTKPREEQYGSTYRVVSVLTVLHQDWLNGKEYKCKVSNKALPAPIEKTISKAKGQPREPQVYTLPPSREEMTKNQVSLTCLVKGFYPSDIAVEWESNGQPENNYKTTPPVLDSDGSFFLYSKLTVDKSRWQQGNVFSCSVMHEALHNHYTQKSLSLSPGK

SEQ ID NO: 1004 - protein, 380 aa, Artificial Sequence
  source: /note="Description of Artificial Sequence: Synthetic polypeptide"
APASSSTKKTQLQLENLLLDLQMILNGINNYKNPKLTRMLTFKFYMPKKATELKHLQCLEEELKPLEEALNLAPSKNFHLRPRDLISNINVIVLELKGSETTFMCEYADETATIVEFLNRWITFSQSIISTLTGGGGSGGGGSGGGGSGGGGSDKTHTCPPCPAPELLGGPSVFLFPPKPKDTLMISRTPEVTCVVVDVSHEDPEVKFNWYVDGVEVHNAKTKPREEQYGSTYRVVSVLTVLHQDWLNGKEYKCKVSNKALPAPIEKTISKAKGQPREPQVYTLPPSREEMTKNQVSLTCLVKGFYPSDIAVEWESNGQPENNYKTTPPVLDSDGSFFLYSKLTVDKSRWQQGNVFSCSVMHEALHNHYTQKSLSLSPGK

SEQ ID NO: 1005 - protein, 380 aa, Artificial Sequence
  source: /note="Description of Artificial Sequence: Synthetic polypeptide"
APASSSTKKTQLQLELLLLDLQMILNGINNYKNPKLTRMLTFKFYMPKKATELKHLQCLEEELKPLEEALNLAPSKNFHLRPRDLISNINVIVLELKGSETTFMCEYADETATIVEFLNRWITFSQSIISTLTGGGGSGGGGSGGGGSGGGGSDKTHTCPPCPAPELLGGPSVFLFPPKPKDTLMISRTPEVTCVVVDVSHEDPEVKFNWYVDGVEVHNAKTKPREEQYGSTYRVVSVLTVLHQDWLNGKEYKCKVSNKALPAPIEKTISKAKGQPREPQVYTLPPSREEMTKNQVSLTCLVKGFYPSDIAVEWESNGQPENNYKTTPPVLDSDGSFFLYSKLTVDKSRWQQGNVFSCSVMHEALHNHYTQKSLSLSPGK

SEQ ID NO: 1006 - protein, 380 aa, Artificial Sequence
  source: /note="Description of Artificial Sequence: Synthetic polypeptide"
APASSSTKKTQLQLEHLLLDLQMILNGINNYKNPKLTRMLTFKFYMPKKATELKHLQCLEEELKPLEEALNLAPSKNFHLRPRDLISNINVSVLELKGSETTFMCEYADETATIVEFLNRWITFSQSIISTLTGGGGSGGGGSGGGGSGGGGSDKTHTCPPCPAPELLGGPSVFLFPPKPKDTLMISRTPEVTCVVVDVSHEDPEVKFNWYVDGVEVHNAKTKPREEQYGSTYRVVSVLTVLHQDWLNGKEYKCKVSNKALPAPIEKTISKAKGQPREPQVYTLPPSREEMTKNQVSLTCLVKGFYPSDIAVEWESNGQPENNYKTTPPVLDSDGSFFLYSKLTVDKSRWQQGNVFSCSVMHEALHNHYTQKSLSLSPGK

SEQ ID NO: 1007 - protein, 380 aa, Artificial Sequence
  source: /note="Description of Artificial Sequence: Synthetic polypeptide"
APTSSSTKKTQLQLENLLLDLQMILNGINNYKNPKLTRMLTFKFYMPKKATELKHLQCLEEELKPLEEALNLAPSKNFHLRPRDLISNINVIVLELKGSETTFMCEYADETATIVEFLNRWITFSQSIISTLTGGGGSGGGGSGGGGSGGGGSDKTHTCPPCPAPELLGGPSVFLFPPKPKDTLMISRTPEVTCVVVDVSHEDPEVKFNWYVDGVEVHNAKTKPREEQYGSTYRVVSVLTVLHQDWLNGKEYKCKVSNKALPAPIEKTISKAKGQPREPQVYTLPPSREEMTKNQVSLTCLVKGFYPSDIAVEWESNGQPENNYKTTPPVLDSDGSFFLYSKLTVDKSRWQQGNVFSCSVMHEALHNHYTQKSLSLSPGK

SEQ ID NO: 1008 - protein, 380 aa, Artificial Sequence
  source: /note="Description of Artificial Sequence: Synthetic polypeptide"
APTSSSTKKTQLQLELLLLDLQMILNGINNYKNPKLTRMLTFKFYMPKKATELKHLQCLEEELKPLEEALNLAPSKNFHLRPRDLISNINVIVLELKGSETTFMCEYADETATIVEFLNRWITFSQSIISTLTGGGGSGGGGSGGGGSGGGGSDKTHTCPPCPAPELLGGPSVFLFPPKPKDTLMISRTPEVTCVVVDVSHEDPEVKFNWYVDGVEVHNAKTKPREEQYGSTYRVVSVLTVLHQDWLNGKEYKCKVSNKALPAPIEKTISKAKGQPREPQVYTLPPSREEMTKNQVSLTCLVKGFYPSDIAVEWESNGQPENNYKTTPPVLDSDGSFFLYSKLTVDKSRWQQGNVFSCSVMHEALHNHYTQKSLSLSPGK

SEQ ID NO: 1009 - protein, 380 aa, Artificial Sequence
  source: /note="Description of Artificial Sequence: Synthetic polypeptide"
APTSSSTKKTQLQLEHLLLDLQMILNGINNYKNPKLTRMLTFKFYMPKKATELKHLQCLEEELKPLEEALNLAPSKNFHLRPRDLISNINVSVLELKGSETTFMCEYADETATIVEFLNRWITFSQSIISTLTGGGGSGGGGSGGGGSGGGGSDKTHTCPPCPAPELLGGPSVFLFPPKPKDTLMISRTPEVTCVVVDVSHEDPEVKFNWYVDGVEVHNAKTKPREEQYGSTYRVVSVLTVLHQDWLNGKEYKCKVSNKALPAPIEKTISKAKGQPREPQVYTLPPSREEMTKNQVSLTCLVKGFYPSDIAVEWESNGQPENNYKTTPPVLDSDGSFFLYSKLTVDKSRWQQGNVFSCSVMHEALHNHYTQKSLSLSPGK

SEQ ID NO: 1010 - DNA, 399 bp, Artificial Sequence
  source: /note="Description of Artificial Sequence: Synthetic polynucleotide"
gcccctgcatcctcctcaactaaaaagacgcaacttcagcttgagaatcttcttctcgaccttcagatgattttgaacggaatcaataattacaaaaatcctaaacttactagaatgctcacgtttaagttttatatgccaaaaaaggccactgagttgaaacaccttcaatgcttggaggaggaacttaaaccacttgaggaagccttgaatcttgctccgtccaaaaactttcatttgcggccacgagatctgataagcaacatcaacgtgatcgtcctggaactgaaaggaagcgaaacgacgtttatgtgcgaatatgcagacgaaactgcgacaatcgttgaatttctcaatcgatggatcacttttagccaatctatcatcagcacgttgact

SEQ ID NO: 1011 - DNA, 399 bp, Artificial Sequence
  source: /note="Description of Artificial Sequence: Synthetic polynucleotide"
gcccctgcatcctcctcaactaaaaagacgcaacttcagcttgagctgcttcttctcgaccttcagatgattttgaacggaatcaataattacaaaaatcctaaacttactagaatgctcacgtttaagttttatatgccaaaaaaggccactgagttgaaacaccttcaatgcttggaggaggaacttaaaccacttgaggaagccttgaatcttgctccgtccaaaaactttcatttgcggccacgagatctgataagcaacatcaacgtgatcgtcctggaactgaaaggaagcgaaacgacgtttatgtgcgaatatgcagacgaaactgcgacaatcgttgaatttctcaatcgatggatcacttttagccaatctatcatcagcacgttgact

SEQ ID NO: 1012 - DNA, 399 bp, Artificial Sequence
  source: /note="Description of Artificial Sequence: Synthetic polynucleotide"
gcccctgcatcctcctcaactaaaaagacgcaacttcagcttgagcatcttcttctcgaccttcagatgattttgaacggaatcaataattacaaaaatcctaaacttactagaatgctcacgtttaagttttatatgccaaaaaaggccactgagttgaaacaccttcaatgcttggaggaggaacttaaaccacttgaggaagccttgaatcttgctccgtccaaaaactttcatttgcggccacgagatctgataagcaacatcaacgtgagcgtcctggaactgaaaggaagcgaaacgacgtttatgtgcgaatatgcagacgaaactgcgacaatcgttgaatttctcaatcgatggatcacttttagccaatctatcatcagcacgttgact

SEQ ID NO: 1013 - DNA, 681 bp, Artificial Sequence
  source: /note="Description of Artificial Sequence: Synthetic polynucleotide"
gataaaactcatacgtgcccaccctgccccgcaccggagctgcttgggggtccttccgtattcttgtttccgccgaagccgaaggacacgcttatgattagcaggactcccgaagtgacgtgcgtcgtagtggacgtgtcgcatgaggacccggaggtcaagttcaactggtatgtcgatggcgtagaagtacacaatgcaaagactaaaccccgcgaagaacagtacggttcgacatacagagtagtgagcgtcttgactgtgctgcaccaggactggctcaacggaaaggagtataagtgtaaagtatcgaataaggcacttcccgcacctatcgagaaaacgatctccaaggctaagggtcagccaagagaaccccaagtctacactctgccccctagccgcgaagagatgacgaaaaaccaggtgtcgctcacttgtttggtgaagggtttctatccgagcgatattgcggtagagtgggaatccaacgggcagccagagaacaattacaagacgacgccaccagtgctggattcggatgggagctttttcttgtactcaaagttgaccgtggataaaagccggtggcagcagggtaatgtgttttcatgctcggtaatgcacgaggccctccataaccattatacgcagaaaagcctttcgctctcacccgggaaa

SEQ ID NO: 1014 - DNA, 1140 bp, Artificial Sequence
  source: /note="Description of Artificial Sequence: Synthetic polynucleotide"
gcccctgcatcctcctcaactaaaaagacgcaacttcagcttgagaatcttcttctcgaccttcagatgattttgaacggaatcaataattacaaaaatcctaaacttactagaatgctcacgtttaagttttatatgccaaaaaaggccactgagttgaaacaccttcaatgcttggaggaggaacttaaaccacttgaggaagccttgaatcttgctccgtccaaaaactttcatttgcggccacgagatctgataagcaacatcaacgtgatcgtcctggaactgaaaggaagcgaaacgacgtttatgtgcgaatatgcagacgaaactgcgacaatcgttgaatttctcaatcgatggatcacttttagccaatctatcatcagcacgttgactggtggtggaggatcgggaggtggaggatctggaggaggaggatcgggtggaggaggatccgataaaactcatacgtgcccaccctgccccgcaccggagctgcttgggggtccttccgtattcttgtttccgccgaagccgaaggacacgcttatgattagcaggactcccgaagtgacgtgcgtcgtagtggacgtgtcgcatgaggacccggaggtcaagttcaactggtatgtcgatggcgtagaagtacacaatgcaaagactaaaccccgcgaagaacagtacggttcgacatacagagtagtgagcgtcttgactgtgctgcaccaggactggctcaacggaaaggagtataagtgtaaagtatcgaataaggcacttcccgcacctatcgagaaaacgatctccaaggctaagggtcagccaagagaaccccaagtctacactctgccccctagccgcgaagagatgacgaaaaaccaggtgtcgctcacttgtttggtgaagggtttctatccgagcgatattgcggtagagtgggaatccaacgggcagccagagaacaattacaagacgacgccaccagtgctggattcggatgggagctttttcttgtactcaaagttgaccgtggataaaagccggtggcagcagggtaatgtgttttcatgctcggtaatgcacgaggccctccataaccattatacgcagaaaagcctttcgctctcacccgggaaa

SEQ ID NO: 1015 - DNA, 1140 bp, Artificial Sequence
  source: /note="Description of Artificial Sequence: Synthetic polynucleotide"
gcccctgcatcctcctcaactaaaaagacgcaacttcagcttgagctgcttcttctcgaccttcagatgattttgaacggaatcaataattacaaaaatcctaaacttactagaatgctcacgtttaagttttatatgccaaaaaaggccactgagttgaaacaccttcaatgcttggaggaggaacttaaaccacttgaggaagccttgaatcttgctccgtccaaaaactttcatttgcggccacgagatctgataagcaacatcaacgtgatcgtcctggaactgaaaggaagcgaaacgacgtttatgtgcgaatatgcagacgaaactgcgacaatcgttgaatttctcaatcgatggatcacttttagccaatctatcatcagcacgttgactggtggtggaggatcgggaggtggaggatctggaggaggaggatcgggtggaggaggatccgataaaactcatacgtgcccaccctgccccgcaccggagctgcttgggggtccttccgtattcttgtttccgccgaagccgaaggacacgcttatgattagcaggactcccgaagtgacgtgcgtcgtagtggacgtgtcgcatgaggacccggaggtcaagttcaactggtatgtcgatggcgtagaagtacacaatgcaaagactaaaccccgcgaagaacagtacggttcgacatacagagtagtgagcgtcttgactgtgctgcaccaggactggctcaacggaaaggagtataagtgtaaagtatcgaataaggcacttcccgcacctatcgagaaaacgatctccaaggctaagggtcagccaagagaaccccaagtctacactctgccccctagccgcgaagagatgacgaaaaaccaggtgtcgctcacttgtttggtgaagggtttctatccgagcgatattgcggtagagtgggaatccaacgggcagccagagaacaattacaagacgacgccaccagtgctggattcggatgggagctttttcttgtactcaaagttgaccgtggataaaagccggtggcagcagggtaatgtgttttcatgctcggtaatgcacgaggccctccataaccattatacgcagaaaagcctttcgctctcacccgggaaa

SEQ ID NO: 1016 - DNA, 1140 bp, Artificial Sequence
  source: /note="Description of Artificial Sequence: Synthetic polynucleotide"
gcccctgcatcctcctcaactaaaaagacgcaacttcagcttgagcatcttcttctcgaccttcagatgattttgaacggaatcaataattacaaaaatcctaaacttactagaatgctcacgtttaagttttatatgccaaaaaaggccactgagttgaaacaccttcaatgcttggaggaggaacttaaaccacttgaggaagccttgaatcttgctccgtccaaaaactttcatttgcggccacgagatctgataagcaacatcaacgtgagcgtcctggaactgaaaggaagcgaaacgacgtttatgtgcgaatatgcagacgaaactgcgacaatcgttgaatttctcaatcgatggatcacttttagccaatctatcatcagcacgttgactggtggtggaggatcgggaggtggaggatctggaggaggaggatcgggtggaggaggatccgataaaactcatacgtgcccaccctgccccgcaccggagctgcttgggggtccttccgtattcttgtttccgccgaagccgaaggacacgcttatgattagcaggactcccgaagtgacgtgcgtcgtagtggacgtgtcgcatgaggacccggaggtcaagttcaactggtatgtcgatggcgtagaagtacacaatgcaaagactaaaccccgcgaagaacagtacggttcgacatacagagtagtgagcgtcttgactgtgctgcaccaggactggctcaacggaaaggagtataagtgtaaagtatcgaataaggcacttcccgcacctatcgagaaaacgatctccaaggctaagggtcagccaagagaaccccaagtctacactctgccccctagccgcgaagagatgacgaaaaaccaggtgtcgctcacttgtttggtgaagggtttctatccgagcgatattgcggtagagtgggaatccaacgggcagccagagaacaattacaagacgacgccaccagtgctggattcggatgggagctttttcttgtactcaaagttgaccgtggataaaagccggtggcagcagggtaatgtgttttcatgctcggtaatgcacgaggccctccataaccattatacgcagaaaagcctttcgctctcacccgggaaa

SEQ ID NO: 1017 - DNA, 1140 bp, Artificial Sequence
  source: /note="Description of Artificial Sequence: Synthetic polynucleotide"
gcccctacgtcctcctcaactaaaaagacgcaacttcagcttgagaatcttcttctcgaccttcagatgattttgaacggaatcaataattacaaaaatcctaaacttactagaatgctcacgtttaagttttatatgccaaaaaaggccactgagttgaaacaccttcaatgcttggaggaggaacttaaaccacttgaggaagccttgaatcttgctccgtccaaaaactttcatttgcggccacgagatctgataagcaacatcaacgtgatcgtcctggaactgaaaggaagcgaaacgacgtttatgtgcgaatatgcagacgaaactgcgacaatcgttgaatttctcaatcgatggatcacttttagccaatctatcatcagcacgttgactggtggtggaggatcgggaggtggaggatctggaggaggaggatcgggtggaggaggatccgataaaactcatacgtgcccaccctgccccgcaccggagctgcttgggggtccttccgtattcttgtttccgccgaagccgaaggacacgcttatgattagcaggactcccgaagtgacgtgcgtcgtagtggacgtgtcgcatgaggacccggaggtcaagttcaactggtatgtcgatggcgtagaagtacacaatgcaaagactaaaccccgcgaagaacagtacggttcgacatacagagtagtgagcgtcttgactgtgctgcaccaggactggctcaacggaaaggagtataagtgtaaagtatcgaataaggcacttcccgcacctatcgagaaaacgatctccaaggctaagggtcagccaagagaaccccaagtctacactctgccccctagccgcgaagagatgacgaaaaaccaggtgtcgctcacttgtttggtgaagggtttctatccgagcgatattgcggtagagtgggaatccaacgggcagccagagaacaattacaagacgacgccaccagtgctggattcggatgggagctttttcttgtactcaaagttgaccgtggataaaagccggtggcagcagggtaatgtgttttcatgctcggtaatgcacgaggccctccataaccattatacgcagaaaagcctttcgctctcacccgggaaa

SEQ ID NO: 1018 - DNA, 1140 bp, Artificial Sequence
  source: /note="Description of Artificial Sequence: Synthetic polynucleotide"
gcccctacgtcctcctcaactaaaaagacgcaacttcagcttgagctgcttcttctcgaccttcagatgattttgaacggaatcaataattacaaaaatcctaaacttactagaatgctcacgtttaagttttatatgccaaaaaaggccactgagttgaaacaccttcaatgcttggaggaggaacttaaaccacttgaggaagccttgaatcttgctccgtccaaaaactttcatttgcggccacgagatctgataagcaacatcaacgtgatcgtcctggaactgaaaggaagcgaaacgacgtttatgtgcgaatatgcagacgaaactgcgacaatcgttgaatttctcaatcgatggatcacttttagccaatctatcatcagcacgttgactggtggtggaggatcgggaggtggaggatctggaggaggaggatcgggtggaggaggatccgataaaactcatacgtgcccaccctgccccgcaccggagctgcttgggggtccttccgtattcttgtttccgccgaagccgaaggacacgcttatgattagcaggactcccgaagtgacgtgcgtcgtagtggacgtgtcgcatgaggacccggaggtcaagttcaactggtatgtcgatggcgtagaagtacacaatgcaaagactaaaccccgcgaagaacagtacggttcgacatacagagtagtgagcgtcttgactgtgctgcaccaggactggctcaacggaaaggagtataagtgtaaagtatcgaataaggcacttcccgcacctatcgagaaaacgatctccaaggctaagggtcagccaagagaaccccaagtctacactctgccccctagccgcgaagagatgacgaaaaaccaggtgtcgctcacttgtttggtgaagggtttctatccgagcgatattgcggtagagtgggaatccaacgggcagccagagaacaattacaagacgacgccaccagtgctggattcggatgggagctttttcttgtactcaaagttgaccgtggataaaagccggtggcagcagggtaatgtgttttcatgctcggtaatgcacgaggccctccataaccattatacgcagaaaagcctttcgctctcacccgggaaa

SEQ ID NO: 1019 - DNA, 1140 bp, Artificial Sequence
  source: /note="Description of Artificial Sequence: Synthetic polynucleotide"
gcccctacgtcctcctcaactaaaaagacgcaacttcagcttgagcatcttcttctcgaccttcagatgattttgaacggaatcaataattacaaaaatcctaaacttactagaatgctcacgtttaagttttatatgccaaaaaaggccactgagttgaaacaccttcaatgcttggaggaggaacttaaaccacttgaggaagccttgaatcttgctccgtccaaaaactttcatttgcggccacgagatctgataagcaacatcaacgtgagcgtcctggaactgaaaggaagcgaaacgacgtttatgtgcgaatatgcagacgaaactgcgacaatcgttgaatttctcaatcgatggatcacttttagccaatctatcatcagcacgttgactggtggtggaggatcgggaggtggaggatctggaggaggaggatcgggtggaggaggatccgataaaactcatacgtgcccaccctgccccgcaccggagctgcttgggggtccttccgtattcttgtttccgccgaagccgaaggacacgcttatgattagcaggactcccgaagtgacgtgcgtcgtagtggacgtgtcgcatgaggacccggaggtcaagttcaactggtatgtcgatggcgtagaagtacacaatgcaaagactaaaccccgcgaagaacagtacggttcgacatacagagtagtgagcgtcttgactgtgctgcaccaggactggctcaacggaaaggagtataagtgtaaagtatcgaataaggcacttcccgcacctatcgagaaaacgatctccaaggctaagggtcagccaagagaaccccaagtctacactctgccccctagccgcgaagagatgacgaaaaaccaggtgtcgctcacttgtttggtgaagggtttctatccgagcgatattgcggtagagtgggaatccaacgggcagccagagaacaattacaagacgacgccaccagtgctggattcggatgggagctttttcttgtactcaaagttgaccgtggataaaagccggtggcagcagggtaatgtgttttcatgctcggtaatgcacgaggccctccataaccattatacgcagaaaagcctttcgctctcacccgggaaa

SEQ ID NO: 1020 - protein, 30 aa, Artificial Sequence
  source: /note="Description of Artificial Sequence: Synthetic polypeptide"
  SITE (1)..(30): /note="This sequence may encompass 1-6 'Gly Gly Gly Gly Ser' repeating units"
  /note="See specification as filed for detailed description of substitutions and preferred embodiments
GGGGSGGGGSGGGGSGGGGSGGGGSGGGGS

SEQ ID NO: 1021 - protein, 27 aa, Artificial Sequence
  source: /note="Description of Artificial Sequence: Synthetic peptide"
  SITE (2)..(26): /note="This region may encompass 2-5 'Glu Ala Ala Ala Lys' repeating units"
  /note="See specification as filed for detailed description of substitutions and preferred embodiments"
AEAAAKEAAAKEAAAKEAAAKEAAAKA

SEQ ID NO: 1022 - protein, 25 aa, Artificial Sequence
  source: /note="Description of Artificial Sequence: Synthetic peptide"
  SITE (1)..(25): /note="This sequence may encompass 1-5 'Gly Gly Gly Ser Ala' repeating units"
  /note="See specification as filed for detailed description of substitutions and preferred embodiments"
GGGSAGGGSAGGGSAGGGSAGGGSA

SEQ ID NO: 1023 - protein, 5 aa, Artificial Sequence
  source: /note="Description of Artificial Sequence: Synthetic peptide"
GGGGS

SEQ ID NO: 1024 - protein, 10 aa, Artificial Sequence
  source: /note="Description of Artificial Sequence: Synthetic peptide"
GGGGSGGGGS

SEQ ID NO: 1025 - protein, 15 aa, Artificial Sequence
  source: /note="Description of Artificial Sequence: Synthetic peptide"
GGGGSGGGGSGGGGS

SEQ ID NO: 1026 - protein, 25 aa, Artificial Sequence
  source: /note="Description of Artificial Sequence: Synthetic peptide"
GGGGSGGGGSGGGGSGGGGSGGGGS

SEQ ID NO: 1027 - protein, 30 aa, Artificial Sequence; identical to SEQ ID NO: 1020
  source: /note="Description of Artificial Sequence: Synthetic polypeptide"

SEQ ID NO: 1028 - protein, 6 aa, Artificial Sequence
  source: /note="Description of Artificial Sequence: Synthetic 6xHis tag"
HHHHHH

SEQ ID NO: 1029 - protein, 5 aa, Artificial Sequence
  source: /note="Description of Artificial Sequence: Synthetic peptide"
GGGGS

SEQ ID NO: 1030 - protein, 135 aa, Artificial Sequence
  source: /note="Description of Artificial Sequence: Synthetic polypeptide"
APTSSSTKKTQLQLEHLLLDLQMILNGINNYKNPKLTRMLTFKFYMPKKATELKHLQCLEEELKPLEEVLNLAQSKNFHLRPRDLISNINVIVLELKGSETTFMCEYADETATIVEFLNRWITFCQSIISTLTGS

SEQ ID NO: 1031 - protein, 133 aa, Homo sapiens [sequence omitted]

SEQ ID NO: 1032 - protein, 133 aa, Artificial Sequence [sequence omitted]
